(19) United States
(12) Patent Application Publication
(10) Pub. No.: US 2010/0260668 A1
(43) Pub. Date: Oct. 14, 2010

(54) Dual Variable Domain Immunoglobulins and Uses Thereof

(75) Inventors: Tariq Ghayur, Holliston, MA (US); Susan E. Morgan-lappe, Chicago, IL (US); Edward B. Reilly, Libertyville, IL (US); Gillian A. Kingsbury, Wayland, MA (US); Andrew Phillips, Libertyville, IL (US); Jieyi Wang, Lake Bluff, IL (US); Randy L. Bell, Lindenhurst, IL (US); Suzanne M. Norvell, Long Grove, IL (US); Yingchun Li, Buffalo Grove, IL (US); Junjian Liu, Shrewsbury, MA (US); Hua Ying, Holden, MA (US); Zhihong Liu, Gurnee, IL (US)

Correspondence Address: ABBOTT BIORESEARCH, 100 RESEARCH DRIVE, WORCESTER, MA, 01605-4314, US

(73) Assignee: ABBOTT LABORATORIES, Abbott Park, IL (US)

(21) Appl. No.: 12/605,094

(22) Filed: Oct. 23, 2009

Related U.S. Application Data
(63) Continuation-in-part of application No. 12/431,460, filed on Apr. 28, 2009.
(60) Provisional application No. 61/125,834, filed on Apr. 29, 2008.
(60) Provisional application No. 61/134,283, filed on Jul. 8, 2008.
(60) Provisional application No. 61/197,191, filed on Oct. 23, 2008.
(60) Provisional application No. 61/199,009, filed on Nov. 12, 2008.

(51) Int. Cl. A61K 51/10; C07K 16/46; C07K 16/32; C07H 21/04; A61K 39/395; A61P 29/00; A61P 21/02; A61P 25/20; A61P 17/06; A61P 19/02; A61P 1/00; A61P 11/00; A61P 1/16; A61P 25/28; A61P 15/00; A61P 3/10; A61P 35/00; A61P 37/06; A61P 9/00; A61P 7/00; A61P 17/00; C12N 15/63; C12N 1/21; C12N 1/11; C12N 5/10; C12N 1/15; C12N 1/19; C12P 21/00

(52) U.S. Cl. 424/1.49; 530/387.3; 530/387.7; 530/391.7; 530/391.3; 536/23.4; 536/23.53; 424/136.1; 424/178.1; 424/138.1; 435/320.1; 435/252.33; 435/258.1; 435/325; 435/419; 435/254.11; 435/349; 435/348; 435/358; 435/365; 435/254.2; 435/254.21; 435/69.6

(57) ABSTRACT

The present invention relates to engineered multivalent and multispecific binding proteins, methods of making, and specifically to their uses in the prevention, diagnosis, and/or treatment of disease.

### REFERENCE TO RELATED APPLICATIONS

[0001] This application is a continuation in part application claiming priority to U.S. application Ser. No. 12/431,460, filed Apr. 28, 2009, which is a non-provisional application that claims priority to U.S. Provisional Application Ser. No. 61/125,834, filed Apr. 29, 2008, U.S. Provisional Application Ser. No. 61/134,283, filed Jul. 8, 2008, U.S. Provisional Application Ser. No. 61/197,191, filed Oct. 23, 2008, and U.S. Provisional Application Ser. No. 61/199,009, filed Nov. 12, 2008, the contents of which are hereby incorporated by reference.

### FIELD OF THE INVENTION

[0002] The present invention relates to multivalent and multispecific binding proteins, methods of making, and specifically to their uses in the, diagnosis, prevention and/or treatment of acute and chronic inflammatory diseases, cancer, and other diseases.

### BACKGROUND OF THE INVENTION

[0003] Engineered proteins, such as multispecific antibodies capable of binding two or more antigens are known in the art. Such multispecific binding proteins can be generated using cell fusion, chemical conjugation, or recombinant DNA techniques.

[0004] Bispecific antibodies have been produced using quadroma technology (see Milstein, C. and A. C. Cuello (1983) Nature 305(5934):537-40) based on the somatic fusion of two different hybridoma cell lines expressing murine monoclonal antibodies (mAbs) with the desired specificities of the bispecific antibody. Because of the random pairing of two different immunoglobulin (Ig) heavy and light chains within the resulting hybrid-hybridoma (or quadroma) cell line, up to ten different Ig species are generated, of which only one is the functional bispecific antibody. The presence of mis-paired by-products, and significantly reduced production yields, means sophisticated purification procedures are required.

[0005] Bispecific antibodies can also be produced by chemical conjugation of two different mAbs (see Staerz, U. D., et al. (1985) Nature 314(6012): 628-31). This approach does not yield homogeneous preparation. Other approaches have used chemical conjugation of two different mAbs or smaller antibody fragments (see Brennan, M., et al. (1985) Science 229(4708): 81-3).

[0006] Another method used to produce bispecific antibodies is the coupling of two parental antibodies with a hetero-bifunctional crosslinker, but the resulting bispecific antibodies suffer from significant molecular heterogeneity because reaction of the crosslinker with the parental antibodies is not site-directed. To obtain more homogeneous preparations of bispecific antibodies two different Fab fragments have been chemically crosslinked at their hinge cysteine residues in a site-directed manner (see Glennie, M. J., et al. (1987) J. Immunol. 139(7): 2367-75). But this method results in Fab′2 fragments, not full IgG molecule.

[0007] A wide variety of other recombinant bispecific antibody formats have been developed (see Kriangkum, J., et al. (2001) Biomol. Eng. 18(2): 31-40). Amongst them tandem single-chain Fv molecules and diabodies, and various derivatives thereof, are the most widely used. Routinely, construction of these molecules starts from two single-chain Fv (scFv) fragments that recognize different antigens (see Economides, A. N., et al. (2003) Nat. Med. 9(1): 47-52). Tandem scFv molecules (taFv) represent a straightforward format simply connecting the two scFv molecules with an additional peptide linker. The two scFv fragments present in these tandem scFv molecules form separate folding entities. Various linkers can be used to connect the two scFv fragments and linkers with a length of up to 63 residues (see Nakanishi, K., et al. (2001) Ann. Rev. Immunol. 19: 423-74). Although the parental scFv fragments can normally be expressed in soluble form in bacteria, it is, however, often observed that tandem scFv molecules form insoluble aggregates in bacteria. Hence, refolding protocols or the use of mammalian expression systems are routinely applied to produce soluble tandem scFv molecules. In a recent study, in vivo expression by transgenic rabbits and cattle of a tandem scFv directed against CD28 and a melanoma-associated proteoglycan was reported (see Gracie, J. A., et al. (1999) J. Clin. Invest. 104(10): 1393-401). In this construct, the two scFv molecules were connected by a CH1 linker and serum concentrations of up to 100 mg/L of the bispecific antibody were found. Various strategies including variations of the domain order or using middle linkers with varying length or flexibility were employed to allow soluble expression in bacteria. A few studies have now reported expression of soluble tandem scFv molecules in bacteria (see Leung, B. P., et al. (2000) J. Immunol. 164(12): 6495-502; Ito, A., et al. (2003) J. Immunol. 170(9): 4802-9; Karni, A., et al. (2002) J. Neuroimmunol. 125(1-2): 134-40) using either a very short Ala3 linker or long glycine/serine-rich linkers. In another recent study, phage display of a tandem scFv repertoire containing randomized middle linkers with a length of 3 or 6 residues was employed to enrich for those molecules that are produced in soluble and active form in bacteria. This approach resulted in the isolation of a tandem scFv molecule with a 6 amino acid residue linker (see Arndt, M. and J. Krauss (2003) Methods Mol. Biol. 207: 305-21). It is unclear whether this linker sequence represents a general solution to the soluble expression of tandem scFv molecules. Nevertheless, this study demonstrated that phage display of tandem scFv molecules in combination with directed mutagenesis is a powerful tool to enrich for these molecules, which can be expressed in bacteria in an active form.

[0008] Bispecific diabodies (Db) utilize the diabody format for expression. Diabodies are produced from scFv fragments by reducing the length of the linker connecting the VH and VL domain to approximately 5 residues (see Peipp, M. and T. Valerius (2002) Biochem. Soc. Trans. 30(4): 507-11). This reduction of linker size facilitates dimerization of two polypeptide chains by crossover pairing of the VH and VL domains. Bispecific diabodies are produced by expressing, two polypeptide chains with, either the structure VHA-VLB and VHB-VLA (VH-VL configuration), or VLA-VHB and VLB-VHA (VL-VH configuration) within the same cell. A large variety of different bispecific diabodies have been produced in the past and most of them are expressed in soluble form in bacteria. However, a recent comparative study demonstrates that the orientation of the variable domains can influence expression and formation of active binding sites (see Mack, M. et al. (1995) Proc. Natl. Acad. Sci. USA 92(15): 7021-5). Nevertheless, soluble expression in bacteria represents an important advantage over tandem scFv molecules. However, since two different polypeptide chains are expressed within a single cell inactive homodimers can be produced together with active heterodimers. This necessitates the implementation of additional purification steps in order to obtain homogenous preparations of bispecific diabodies. One approach to force the generation of bispecific diabodies is the production of knob-into-hole diabodies (see Holliger, P., T. Prospero, and G. Winter (1993) Proc. Natl. Acad. Sci. USA 90(14): 6444-8.18). This approach was demonstrated for a bispecific diabody directed against HER2 and CD3. A large knob was introduced in the VH domain by exchanging Val37 with Phe and Leu45 with Trp and a complementary hole was produced in the VL domain by mutating Phe98 to Met and Tyr87 to Ala, either in the anti-HER2 or the anti-CD3 variable domains. By using this approach the production of bispecific diabodies could be increased from 72% by the parental diabody to over 90% by the knob-into-hole diabody. Importantly, production yields only slightly decrease as a result of these mutations. However, a reduction in antigen-binding activity was observed for several constructs. Thus, this rather elaborate approach requires the analysis of various constructs in order to identify those mutations that produce heterodimeric molecule with unaltered binding activity. In addition, such approach requires mutational modification of the immunoglobulin sequence at the constant region, thus creating non-native and non-natural form of the antibody sequence, which may result in increased immunogenicity, poor in vivo stability, as well as undesirable pharmacokinetics.

[0009] Single-chain diabodies (scDb) represent an alternative strategy for improving the formation of bispecific diabody-like molecules (see Holliger, P. and G. Winter (1997) Cancer Immunol. Immunother. 45(3-4): 128-30; Wu, A. M., et al. (1996) Immunotechnology 2(1): p. 21-36). Bispecific single-chain diabodies are produced by connecting the two diabody-forming polypeptide chains with an additional middle linker with a length of approximately 15 amino acid residues. Consequently, all molecules with a molecular weight corresponding to monomeric single-chain diabodies (50-60 kDa) are bispecific. Several studies have demonstrated that bispecific single chain diabodies are expressed in bacteria in soluble and active form with the majority of purified molecules present as monomers (see Holliger, P. and G. Winter (1997) Cancer Immunol. Immunother. 45(3-4): 128-30; Wu, A. M., et al. (1996) Immunotechnol. 2(1): 21-36; Pluckthun, A. and P. Pack (1997) Immunotechnol. 3(2): 83-105; Ridgway, J. B., et al. (1996) Protein Engin. 9(7): 617-21). Thus, single-chain diabodies combine the advantages of tandem scFvs (all monomers are bispecific) and diabodies (soluble expression in bacteria).

[0010] More recently diabodies have been fused to Fc to generate more Ig-like molecules, named di-diabodies (see Lu, D., et al. (2004) J. Biol. Chem. 279(4): 2856-65). In addition, multivalent antibody construct comprising two Fab repeats in the heavy chain of an IgG and capable of binding four antigen molecules has been described (see WO 0177342A1, and Miller, K., et al. (2003) J. Immunol. 170(9): 4854-61).

[0011] There is a need in the art for improved multivalent binding proteins capable of binding two or more antigens. U.S. patent application Ser. No. 11/507,050 provides a novel family of binding proteins capable of binding two or more antigens with high affinity, which are called dual variable domain immunoglobulins (DVD-Ig™). The present invention provides further novel binding proteins capable of binding two or more antigens.

### SUMMARY OF THE INVENTION

[0012] This invention pertains to multivalent binding proteins capable of binding two or more antigens. The present invention provides a novel family of binding proteins capable of binding two or more antigens with high affinity.

[0013] In one embodiment the invention provides a binding protein comprising a polypeptide chain, wherein the polypeptide chain comprises VD1-(X1)n-VD2-C-(X2)n, wherein VD1 is a first variable domain, VD2 is a second variable domain, C is a constant domain, X1 represents an amino acid or polypeptide, X2 represents an Fc region and n is 0 or 1. In an embodiment the VD1 and VD2 in the binding protein are heavy chain variable domains. In another embodiment, the heavy chain variable domain is selected from the group consisting of a murine heavy chain variable domain, a human heavy chain variable domain, a CDR grafted heavy chain variable domain, and a humanized heavy chain variable domain. In yet another, embodiment VD1 and VD2 are capable of binding the same antigen. In another embodiment VD1 and VD2 are capable of binding different antigens. In still another embodiment, C is a heavy chain constant domain. For example, X1 is a linker with the proviso that X1 is not CH1. For example, X1 is a linker selected from the group consisting of AKTTPKLEEGEFSEAR (SEQ ID NO: 1); AKTTPKLEEGEFSEARV (SEQ ID NO: 2); AKTTPKLGG (SEQ ID NO: 3); SAKTTPKLGG (SEQ ID NO: 4); SAKTTP (SEQ ID NO: 5); RADAAP (SEQ ID NO: 6); RADAAPTVS (SEQ ID NO: 7); RADAAAAGGPGS (SEQ ID NO: 8); RADAAAA(G₄S)₄ (SEQ ID NO: 9); SAKTTPKLEEGEFSEARV (SEQ ID NO: 10); ADAAP (SEQ ID NO: 11); ADAAPTVSIFPP (SEQ ID NO: 12); TVAAP (SEQ ID NO: 13); TVAAPSVFIFPP (SEQ ID NO: 14); QPKAAP (SEQ ID NO: 15); QPKAAPSVTLFPP (SEQ ID NO: 16); AKTTPP (SEQ ID NO: 17); AKTTPPSVTPLAP (SEQ ID NO: 18); AKTTAP (SEQ ID NO: 19); AKTTAPSVYPLAP (SEQ ID NO: 20); ASTKGP (SEQ ID NO: 21); ASTKGPSVFPLAP (SEQ ID NO: 22), GGGGSGGGGSGGGGS (SEQ ID NO: 23); GENKVEYAPALMALS (SEQ ID NO: 24); GPAKELTPLKEAKVS (SEQ ID NO: 25); GHEAAAVMQVQYPAS (SEQ ID NO: 26). In an embodiment, X2 is an Fc region. In another embodiment, X2 is a variant Fc region.

[0014] In an embodiment the binding protein disclosed herein comprises a polypeptide chain, wherein the polypeptide chain comprises VD1-(X1)n-VD2-C-(X2)n, wherein VD1 is a first heavy chain variable domain, VD2 is a second heavy chain variable domain, C is a heavy chain constant domain, X1 is a linker with the proviso that it is not CH1, and X2 is an Fc region.

[0015] In an embodiment, VD1 and VD2 in the binding protein are light chain variable domains. In an embodiment, the light chain variable domain is selected from the group consisting of a murine light chain variable domain, a human light chain variable domain, a CDR grafted light chain variable domain, and a humanized light chain variable domain. In one embodiment VD1 and VD2 are capable of binding the same antigen. In another embodiment VD1 and VD2 are capable of binding different antigens. In an embodiment, C is a light chain constant domain. In another embodiment, X1 is a linker with the proviso that X1 is not CL1. In an embodiment, X1 is a linker selected from the group consisting of AKTTPKLEEGEFSEAR (SEQ ID NO: 1); AKTTPKLEEGEFSEARV (SEQ ID NO: 2); AKTTPKLGG (SEQ ID NO: 3); SAKTTPKLGG (SEQ ID NO: 4); SAKTTP (SEQ ID NO: 5); RADAAP (SEQ ID NO: 6); RADAAPTVS (SEQ ID NO: 7); RADAAAAGGPGS (SEQ ID NO: 8); RADAAAA(G₄S)₄ (SEQ ID NO: 9); SAKTTPKLEEGEFSEARV (SEQ ID NO: 10); ADAAP (SEQ ID NO: 11); ADAAPTVSIFPP (SEQ ID NO: 12); TVAAP (SEQ ID NO: 13); TVAAPSVFIFPP (SEQ ID NO: 14); QPKAAP (SEQ ID NO: 15); QPKAAPSVTLFPP (SEQ ID NO: 16); AKTTPP (SEQ ID NO: 17); AKTTPPSVTPLAP (SEQ ID NO: 18); AKTTAP (SEQ ID NO: 19); AKTTAPSVYPLAP (SEQ ID NO: 20); ASTKGP (SEQ ID NO: 21); ASTKGPSVFPLAP (SEQ ID NO: 22) GGGGSGGGGSGGGGS (SEQ ID NO: 23); GENKVEYAPALMALS (SEQ ID NO: 24); GPAKELTPLKEAKVS (SEQ ID NO: 25); GHEAAAVMQVQYPAS (SEQ ID NO: 26). In an embodiment, the binding protein does not comprise X2.

[0016] In an embodiment, both the variable heavy and variable light chain comprise the same linker. In another embodiment, the variable heavy and variable light chain comprise different linkers. In another embodiment, both the variable heavy and variable light chain comprise a short (about 6 amino acids) linker. In another embodiment, both the variable heavy and variable light chain comprise a long (greater than 6 amino acids) linker. In another embodiment, the variable heavy chain comprises a short linker and the variable light chain comprises a long linker. In another embodiment, the variable heavy chain comprises a long linker and the variable light chain comprises a short linker.

[0017] In an embodiment the binding protein disclosed herein comprises a polypeptide chain, wherein said polypeptide chain comprises VD1-(X1)n-VD2-C-(X2)n, wherein VD1 is a first light chain variable domain, VD2 is a second light chain variable domain, C is a light chain constant domain, X1 is a linker with the proviso that it is not CH1, and X2 does not comprise an Fc region.

[0018] In another embodiment the invention provides a binding protein comprising two polypeptide chains, wherein said first polypeptide chain comprises VD1-(X1)n-VD2-C-(X2)n, wherein VD1 is a first heavy chain variable domain, VD2 is a second heavy chain variable domain, C is a heavy chain constant domain, X1 is a linker with the proviso that it is not CH1, and X2 is an Fc region; and said second polypeptide chain comprises VD1-(X1)n-VD2-C-(X2)n, wherein VD1 is a first light chain variable domain, VD2 is a second light chain variable domain, C is a light chain constant domain, X1 is a linker with the proviso that it is not CH1, and X2 does not comprise an Fc region. In a particular embodiment, the Dual Variable Domain (DVD) binding protein comprises four polypeptide chains wherein the first two polypeptide chains comprises VD1-(X1)n-VD2-C-(X2)n, respectively wherein VD1 is a first heavy chain variable domain, VD2 is a second heavy chain variable domain, C is a heavy chain constant domain, X1 is a linker with the proviso that it is not CH1, and X2 is an Fc region; and the second two polypeptide chain comprises VD1-(X1)n-VD2-C-(X2)n respectively, wherein VD1 is a first light chain variable domain, VD2 is a second light chain variable domain, C is a light chain constant domain, X1 is a linker with the proviso that it is not CH1, and X2 does not comprise an Fc region. Such a Dual Variable Domain (DVD) protein has four antigen binding sites.

[0019] In another embodiment the binding proteins disclosed herein are capable of binding one or more targets. In an embodiment, the target is selected from the group consisting of cytokines, cell surface proteins, enzymes and receptors. In another embodiment, the binding protein is capable of modulating a biological function of one or more targets. In another embodiment, the binding protein is capable of neutralizing one or more targets. The binding protein of the invention is capable of binding cytokines selected from the group consisting of lymphokines, monokines, polypeptide hormones, receptors, or tumor markers. For example, the DVD-Ig of the invention is capable of binding two or more of the following: CD-20, CD-19, CD-80, CD-22, CD-40, CD-3, human epidermal growth factor receptor 2 (HER-2), epidermal growth factor receptor (EGFR), insulin-like growth factor 1,2 (IGF1,2), insulin-like growth factor receptor (IGF1R), macrophage stimulating protein receptor tyrosine kinase (RON), hepatocyte growth factor (HGF), mesenchymal-epithelial transition factor (c-MET), vascular endothelial growth factor (VEGF), Drosophila Delta homologue 4 (DLL4), neuropilin 1 (NRP1), placental growth factor (PLGF), and v-erb-b2 avian erythroblastic leukemia viral oncogene homolog 3 (ErbB3) (see also Table 2). In a specific embodiment the binding protein is capable of binding pairs of targets selected from the group consisting of CD-20 and CD-19; CD-20 and CD-80; CD-20 and CD-22; CD-20 and CD-40; CD-3 and HER-2; CD-3 and CD-19; EGFR and HER-2; EGFR and CD-3; EGFR and IGF1,2; EGFR and IGF1R; EGFR and RON; EGFR and HGF; EGFR and c-MET; HER-2 and IGF1,2; HER-2 and IGF1R; RON and HGF; VEGF and EGFR; VEGF and HER-2; VEGF and CD-20; VEGF and IGF1,2; VEGF and DLL4; VEGF and HGF; VEGF and RON; VEGF and NRP1; CD-20 and CD3; DLL-4 and PLGF; VEGF and PLGF; ErbB3 and EGFR; ErbB3 and HGF; HER-2 and ErbB3; c-Met and ErB3; PLGF and HER-2; HER-2 and HER-2.

[0020] In an embodiment, the binding protein capable of binding CD-20 and CD-19 comprises a DVD heavy chain amino acid sequence selected from the group consisting of SEQ ID NO. 122 and SEQ ID NO. 114; and a DVD light chain amino acid sequence selected from the group consisting of SEQ ID NO. 113 and SEQ ID NO. 115. In an embodiment, the binding protein capable of binding CD-20 and CD-19 comprises a DVD heavy chain amino acid sequence of SEQ ID NO. 112 and a DVD light chain amino acid sequence of SEQ ID NO: 113. In another embodiment, the binding protein capable of binding CD-20 and CD-19 has a reverse orientation and comprises a DVD heavy chain amino acid sequence of SEQ ID NO. 114 and a DVD light chain amino acid sequence of SEQ ID NO: 115.

[0021] In an embodiment, the binding protein capable of binding CD-20 and CD-3 (seq. 1) comprises a DVD heavy chain amino acid sequence selected from the group consisting of SEQ ID NO. 116 and SEQ ID NO. 118; and a DVD light chain amino acid sequence selected from the group consisting of SEQ ID NO. 117 and SEQ ID NO. 119. In an embodiment, the binding protein capable of binding CD-20 and CD-3 (seq. 1) comprises a DVD heavy chain amino acid sequence of SEQ ID NO. 116 and a DVD light chain amino acid sequence of SEQ ID NO: 117. In another embodiment, the binding protein capable of binding CD-20 and CD-3 (seq. 1) has a reverse orientation and comprises a DVD heavy chain amino acid sequence of SEQ ID NO. 118 and a DVD light chain amino acid sequence of SEQ ID NO: 119.

[0022] In an embodiment, the binding protein capable of binding CD-20 and CD-80 comprises a DVD heavy chain amino acid sequence selected from the group consisting of SEQ ID NO. 120 and SEQ ID NO. 122; and a DVD light chain amino acid sequence selected from the group consisting of SEQ ID NO. 121 and SEQ ID NO. 123. In an embodiment, the binding protein capable of binding CD-20 and CD-80 comprises a DVD heavy chain amino acid sequence of SEQ ID NO. 120 and a DVD light chain amino acid sequence of SEQ ID NO: 121. In another embodiment, the binding protein capable of binding CD-20 and CD-80 has a reverse orientation and comprises a DVD heavy chain amino acid sequence of SEQ ID NO. 122 and a DVD light chain amino acid sequence of SEQ ID NO: 123.

[0023] In an embodiment, the binding protein capable of binding CD-20 and CD-22 comprises a DVD heavy chain amino acid sequence selected from the group consisting of SEQ ID NO. 124 and SEQ ID NO. 126; and a DVD light chain amino acid sequence selected from the group consisting of SEQ ID NO. 125 and SEQ ID NO. 127. In an embodiment, the binding protein capable of binding CD-20 and CD-22 comprises a DVD heavy chain amino acid sequence of SEQ ID NO. 124 and a DVD light chain amino acid sequence of SEQ ID NO: 125. In another embodiment, the binding protein capable of binding CD-20 and CD-22 has a reverse orientation and comprises a DVD heavy chain amino acid sequence of SEQ ID NO. 126 and a DVD light chain amino acid sequence of SEQ ID NO: 127.

[0024] In an embodiment, the binding protein capable of binding CD-20 and CD-40 comprises a DVD heavy chain amino acid sequence selected from the group consisting of SEQ ID NO. 128 and SEQ ID NO. 130; and a DVD light chain amino acid sequence selected from the group consisting of SEQ ID NO. 129 and SEQ ID NO. 131. In an embodiment, the binding protein capable of binding CD-20 and CD-40 comprises a DVD heavy chain amino acid sequence of SEQ ID NO. 128 and a DVD light chain amino acid sequence of SEQ ID NO: 129. In another embodiment, the binding protein capable of binding CD-20 and CD-40 has a reverse orientation and comprises a DVD heavy chain amino acid sequence of SEQ ID NO. 130 and a DVD light chain amino acid sequence of SEQ ID NO: 131.

[0025] In an embodiment, the binding protein capable of binding CD-3 (seq. 1) and HER-2 (seq. 1) comprises a DVD heavy chain amino acid sequence selected from the group consisting of SEQ ID NO. 132 and SEQ ID NO. 134; and a DVD light chain amino acid sequence selected from the group consisting of SEQ ID NO. 133 and SEQ ID NO. 135. In an embodiment, the binding protein capable of binding CD-3 (seq. 1) and HER-2 (seq. 1) comprises a DVD heavy chain amino acid sequence of SEQ ID NO. 132 and a DVD light chain amino acid sequence of SEQ ID NO: 133. In another embodiment, the binding protein capable of binding CD-3 (seq. 1) and HER-2 (seq. 1) has a reverse orientation and comprises a DVD heavy chain amino acid sequence of SEQ ID NO. 134 and a DVD light chain amino acid sequence of SEQ ID NO: 135.

[0026] In an embodiment, the binding protein capable of binding CD-3 (seq. 1) and CD-19 comprises a DVD heavy chain amino acid sequence selected from the group consisting of SEQ ID NO. 136 and SEQ ID NO. 138; and a DVD light chain amino acid sequence selected from the group consisting of SEQ ID NO. 137 and SEQ ID NO. 139. In an embodiment, the binding protein capable of binding CD-3 (seq. 1) and CD-19 comprises a DVD heavy chain amino acid sequence of SEQ ID NO. 136 and a DVD light chain amino acid sequence of SEQ ID NO: 137. In another embodiment, the binding protein capable of binding CD-3 (seq. 1) and CD-19 has a reverse orientation and comprises a DVD heavy chain amino acid sequence of SEQ ID NO. 138 and a DVD light chain amino acid sequence of SEQ ID NO: 139.

[0027] In an embodiment, the binding protein capable of binding EGFR (seq. 2) and HER-2 (seq. 1) comprises a DVD heavy chain amino acid sequence selected from the group consisting of SEQ ID NO. 140 and SEQ ID NO. 142; and a DVD light chain amino acid sequence selected from the group consisting of SEQ ID NO. 141 and SEQ ID NO. 143. In an embodiment, the binding protein capable of binding EGFR (seq. 2) and HER-2 (seq. 1) comprises a DVD heavy chain amino acid sequence of SEQ ID NO. 140 and a DVD light chain amino acid sequence of SEQ ID NO: 141. In another embodiment, the binding protein capable of binding EGFR (seq. 2) and HER-2 (seq. 1) has a reverse orientation and comprises a DVD heavy chain amino acid sequence of SEQ ID NO. 142 and a DVD light chain amino acid sequence of SEQ ID NO: 143.

[0028] In an embodiment, the binding protein capable of binding EGFR (seq. 2) and CD-3 (seq. 1) comprises a DVD heavy chain amino acid sequence selected from the group consisting of SEQ ID NO. 144 and SEQ ID NO. 146; and a DVD light chain amino acid sequence selected from the group consisting of SEQ ID NO. 145 and SEQ ID NO. 147. In an embodiment, the binding protein capable of binding EGFR (seq. 2) and CD-3 (seq. 1) comprises a DVD heavy chain amino acid sequence of SEQ ID NO. 144 and a DVD light chain amino acid sequence of SEQ ID NO: 145. In another embodiment, the binding protein capable of binding EGFR (seq. 1) and CD-3 (seq. 1) has a reverse orientation and comprises a DVD heavy chain amino acid sequence of SEQ ID NO. 146 and a DVD light chain amino acid sequence of SEQ ID NO: 147.

[0029] In an embodiment, the binding protein capable of binding EGFR (seq. 2) and IGF1,2 comprises a DVD heavy chain amino acid sequence selected from the group consisting of SEQ ID NO. 148 and SEQ ID NO. 150; and a DVD light chain amino acid sequence selected from the group consisting of SEQ ID NO. 149 and SEQ ID NO. 151. In an embodiment, the binding protein capable of binding EGFR (seq. 2) and IGF1,2 comprises a DVD heavy chain amino acid sequence of SEQ ID NO. 148 and a DVD light chain amino acid sequence of SEQ ID NO: 149. In another embodiment, the binding protein capable of binding EGFR (seq. 2) and IGF1,2 has a reverse orientation and comprises a DVD heavy chain amino acid sequence of SEQ ID NO. 150 and a DVD light chain amino acid sequence of SEQ ID NO: 151.

[0030] In an embodiment, the binding protein capable of binding EGFR (seq. 2) and IGF1R (seq. 1) comprises a DVD heavy chain amino acid sequence selected from the group consisting of SEQ ID NO. 152 and SEQ ID NO. 154; and a DVD light chain amino acid sequence selected from the group consisting of SEQ ID NO. 153 and SEQ ID NO. 155. In an embodiment, the binding protein capable of binding EGFR (seq. 2) and IGF1R (seq. 1) comprises a DVD heavy chain amino acid sequence of SEQ ID NO. 152 and a DVD light chain amino acid sequence of SEQ ID NO: 153. In another embodiment, the binding protein capable of binding EGFR (seq. 2) and IGF1R (seq. 1) has a reverse orientation and comprises a DVD heavy chain amino acid sequence of SEQ ID NO. 154 and a DVD light chain amino acid sequence of SEQ ID NO: 155.

[0031] In a second embodiment, the binding protein capable of binding EGFR (seq. 2) and IGF1R (seq. 1) comprises a DVD heavy chain amino acid sequence selected from the group consisting of SEQ ID NO. 156 and SEQ ID NO. 158; and a DVD light chain amino acid sequence selected from the group consisting of SEQ ID NO. 157 and SEQ ID NO. 159. In an embodiment, the binding protein capable of binding EGFR (seq. 2) and IGF1R (seq. 1) comprises a DVD heavy chain amino acid sequence of SEQ ID NO. 156 and a DVD light chain amino acid sequence of SEQ ID NO: 157. In another embodiment, the binding protein capable of binding EGFR (seq. 2) and IGF1R (seq. 1) has a reverse orientation and comprises a DVD heavy chain amino acid sequence of SEQ ID NO. 158 and a DVD light chain amino acid sequence of SEQ ID NO: 159.

[0032] In a third embodiment, the binding protein capable of binding EGFR (seq. 2) and IGF1R (seq. 1) comprises a DVD heavy chain amino acid sequence selected from the group consisting of SEQ ID NO. 160 and SEQ ID NO. 162; and a DVD light chain amino acid sequence selected from the group consisting of SEQ ID NO. 161 and SEQ ID NO. 163. In an embodiment, the binding protein capable of binding EGFR (seq. 2) and IGF1R (seq. 1) comprises a DVD heavy chain amino acid sequence of SEQ ID NO. 160 and a DVD light chain amino acid sequence of SEQ ID NO: 161. In another embodiment, the binding protein capable of binding EGFR (seq. 2) and IGF1R (seq. 1) has a reverse orientation and comprises a DVD heavy chain amino acid sequence of SEQ ID NO. 162 and a DVD light chain amino acid sequence of SEQ ID NO: 163.

[0033] In a fourth embodiment, the binding protein capable of binding EGFR (seq. 2) and IGF1R (seq. 1) comprises a DVD heavy chain amino acid sequence selected from the group consisting of SEQ ID NO. 164 and SEQ ID NO. 166; and a DVD light chain amino acid sequence selected from the group consisting of SEQ ID NO. 165 and SEQ ID NO. 167. In an embodiment, the binding protein capable of binding EGFR (seq. 2) and IGF1R (seq. 1) comprises a DVD heavy chain amino acid sequence of SEQ ID NO. 164 and a DVD light chain amino acid sequence of SEQ ID NO: 165. In another embodiment, the binding protein capable of binding EGFR (seq. 2) and IGF1R (seq. 1) has a reverse orientation and comprises a DVD heavy chain amino acid sequence of SEQ ID NO. 166 and a DVD light chain amino acid sequence of SEQ ID NO: 167.

[0034] In an embodiment, the binding protein capable of binding EGFR (seq. 2) and IGF1R (seq. 2) comprises a DVD heavy chain amino acid sequence selected from the group consisting of SEQ ID NO. 168 and SEQ ID NO. 170; and a DVD light chain amino acid sequence selected from the group consisting of SEQ ID NO. 169 and SEQ ID NO. 171. In an embodiment, the binding protein capable of binding EGFR (seq. 2) and IGF1R (seq. 2) comprises a DVD heavy chain amino acid sequence of SEQ ID NO. 168 and a DVD light chain amino acid sequence of SEQ ID NO: 169. In another embodiment, the binding protein capable of binding EGFR (seq. 2) and IGF1R (seq. 2) has a reverse orientation and comprises a DVD heavy chain amino acid sequence of SEQ ID NO. 170 and a DVD light chain amino acid sequence of SEQ ID NO: 171.

[0035] In a second embodiment, the binding protein capable of binding EGFR (seq. 2) and IGF1R (seq. 2) comprises a DVD heavy chain amino acid sequence selected from the group consisting of SEQ ID NO. 172 and SEQ ID NO. 174; and a DVD light chain amino acid sequence selected from the group consisting of SEQ ID NO. 173 and SEQ ID NO. 175. In an embodiment, the binding protein capable of binding EGFR (seq. 2) and IGF1R (seq. 2) comprises a DVD heavy chain amino acid sequence of SEQ ID NO. 172 and a DVD light chain amino acid sequence of SEQ ID NO: 173. In another embodiment, the binding protein capable of binding EGFR (seq. 2) and IGF1R (seq. 2) has a reverse orientation and comprises a DVD heavy chain amino acid sequence of SEQ ID NO. 174 and a DVD light chain amino acid sequence of SEQ ID NO: 175.

[0036] In a third embodiment, the binding protein capable of binding EGFR (seq. 2) and IGF1R (seq. 2) comprises a DVD heavy chain amino acid sequence selected from the group consisting of SEQ ID NO. 176 and SEQ ID NO. 178; and a DVD light chain amino acid sequence selected from the group consisting of SEQ ID NO. 177 and SEQ ID NO. 179. In an embodiment, the binding protein capable of binding EGFR (seq. 2) and IGF1R (seq. 2) comprises a DVD heavy chain amino acid sequence of SEQ ID NO. 176 and a DVD light chain amino acid sequence of SEQ ID NO: 177. In another embodiment, the binding protein capable of binding EGFR (seq. 2) and IGF1R (seq. 2) has a reverse orientation and comprises a DVD heavy chain amino acid sequence of SEQ ID NO. 178 and a DVD light chain amino acid sequence of SEQ ID NO: 179.

[0037] In a fourth embodiment, the binding protein capable of binding EGFR (seq. 2) and IGF1R (seq. 2) comprises a DVD heavy chain amino acid sequence selected from the group consisting of SEQ ID NO. 180 and SEQ ID NO. 182; and a DVD light chain amino acid sequence selected from the group consisting of SEQ ID NO. 181 and SEQ ID NO. 183. In an embodiment, the binding protein capable of binding EGFR (seq. 2) and IGF1R (seq. 2) comprises a DVD heavy chain amino acid sequence of SEQ ID NO. 18 and a DVD light chain amino acid sequence of SEQ ID NO: 181. In another embodiment, the binding protein capable of binding EGFR (seq. 2) and IGF1R (seq. 2) has a reverse orientation and comprises a DVD heavy chain amino acid sequence of SEQ ID NO. 182 and a DVD light chain amino acid sequence of SEQ ID NO: 183.

[0038] In an embodiment, the binding protein capable of binding EGFR (seq. 2) and IGF1R (seq. 3) comprises a DVD heavy chain amino acid sequence selected from the group consisting of SEQ ID NO. 184 and SEQ ID NO. 186; and a DVD light chain amino acid sequence selected from the group consisting of SEQ ID NO. 185 and SEQ ID NO. 187. In an embodiment, the binding protein capable of binding EGFR (seq. 2) and IGF1R (seq. 3) comprises a DVD heavy chain amino acid sequence of SEQ ID NO. 184 and a DVD light chain amino acid sequence of SEQ ID NO: 185. In another embodiment, the binding protein capable of binding EGFR (seq. 2) and IGF1R (seq. 3) has a reverse orientation and comprises a DVD heavy chain amino acid sequence of SEQ ID NO. 186 and a DVD light chain amino acid sequence of SEQ ID NO: 187.

[0039] In a second embodiment, the binding protein capable of binding EGFR (seq. 2) and IGF1R (seq. 3) comprises a DVD heavy chain amino acid sequence selected from the group consisting of SEQ ID NO. 188 and SEQ ID NO. 190; and a DVD light chain amino acid sequence selected from the group consisting of SEQ ID NO. 189 and SEQ ID NO. 192. In an embodiment, the binding protein capable of binding EGFR (seq. 2) and IGF1R (seq. 3) comprises a DVD heavy chain amino acid sequence of SEQ ID NO. 188 and a DVD light chain amino acid sequence of SEQ ID NO: 189. In another embodiment, the binding protein capable of binding EGFR (seq. 2) and IGF1R (seq. 3) has a reverse orientation and comprises a DVD heavy chain amino acid sequence of SEQ ID NO. 190 and a DVD light chain amino acid sequence of SEQ ID NO: 191.

[0040] In a third embodiment, the binding protein capable of binding EGFR (seq. 2) and IGF1R (seq. 3) comprises a DVD heavy chain amino acid sequence selected from the group consisting of SEQ ID NO. 192 and SEQ ID NO. 194; and a DVD light chain amino acid sequence selected from the group consisting of SEQ ID NO. 193 and SEQ ID NO. 195. In an embodiment, the binding protein capable of binding EGFR (seq. 2) and IGF1R (seq. 3) comprises a DVD heavy chain amino acid sequence of SEQ ID NO. 192 and a DVD light chain amino acid sequence of SEQ ID NO: 193. In another embodiment, the binding protein capable of binding EGFR (seq. 2) and IGF1R (seq. 3) has a reverse orientation and comprises a DVD heavy chain amino acid sequence of SEQ ID NO. 194 and a DVD light chain amino acid sequence of SEQ ID NO: 195.

[0041] In a fourth embodiment, the binding protein capable of binding EGFR (seq. 2) and IGF1R (seq. 3) comprises a DVD heavy chain amino acid sequence selected from the group consisting of SEQ ID NO. 196 and SEQ ID NO. 198; and a DVD light chain amino acid sequence selected from the group consisting of SEQ ID NO. 197 and SEQ ID NO. 199. In an embodiment, the binding protein capable of binding EGFR (seq. 2) and IGF1R (seq. 3) comprises a DVD heavy chain amino acid sequence of SEQ ID NO. 196 and a DVD light chain amino acid sequence of SEQ ID NO: 197. In another embodiment, the binding protein capable of binding EGFR (seq. 2) and IGF1R (seq. 3) has a reverse orientation and comprises a DVD heavy chain amino acid sequence of SEQ ID NO. 198 and a DVD light chain amino acid sequence of SEQ ID NO: 199.

[0042] In an embodiment, the binding protein capable of binding EGFR (seq. 2) and RON (seq. 1) comprises a DVD heavy chain amino acid sequence selected from the group consisting of SEQ ID NO. 200 and SEQ ID NO. 202; and a DVD light chain amino acid sequence selected from the group consisting of SEQ ID NO. 201 and SEQ ID NO. 203. In an embodiment, the binding protein capable of binding EGFR (seq. 2) and RON (seq. 1) comprises a DVD heavy chain amino acid sequence of SEQ ID NO. 200 and a DVD light chain amino acid sequence of SEQ ID NO: 201. In another embodiment, the binding protein capable of binding EGFR (seq. 2) and RON (seq. 1) has a reverse orientation and comprises a DVD heavy chain amino acid sequence of SEQ ID NO. 202 and a DVD light chain amino acid sequence of SEQ ID NO: 203.

[0043] In a second embodiment, the binding protein capable of binding EGFR (seq. 2) and RON (seq. 1) comprises a DVD heavy chain amino acid sequence selected from the group consisting of SEQ ID NO. 204 and SEQ ID NO. 206; and a DVD light chain amino acid sequence selected from the group consisting of SEQ ID NO. 205 and SEQ ID NO. 207. In an embodiment, the binding protein capable of binding EGFR (seq. 2) and RON (seq. 1) comprises a DVD heavy chain amino acid sequence of SEQ ID NO. 204 and a DVD light chain amino acid sequence of SEQ ID NO: 205. In another embodiment, the binding protein capable of binding EGFR (seq. 2) and RON (seq. 1) has a reverse orientation and comprises a DVD heavy chain amino acid sequence of SEQ ID NO. 206 and a DVD light chain amino acid sequence of SEQ ID NO: 207.

[0044] In a third embodiment, the binding protein capable of binding EGFR (seq. 2) and RON (seq. 1) comprises a DVD heavy chain amino acid sequence selected from the group consisting of SEQ ID NO. 208 and SEQ ID NO. 210; and a DVD light chain amino acid sequence selected from the group consisting of SEQ ID NO. 209 and SEQ ID NO. 211. In an embodiment, the binding protein capable of binding EGFR (seq. 2) and RON (seq. 1) comprises a DVD heavy chain amino acid sequence of SEQ ID NO. 208 and a DVD light chain amino acid sequence of SEQ ID NO: 209. In another embodiment, the binding protein capable of binding EGFR (seq. 2) and RON (seq. 1) has a reverse orientation and comprises a DVD heavy chain amino acid sequence of SEQ ID NO. 210 and a DVD light chain amino acid sequence of SEQ ID NO: 211.

[0045] In a fourth embodiment, the binding protein capable of binding EGFR (seq. 2) and RON (seq. 1) comprises a DVD heavy chain amino acid sequence selected from the group consisting of SEQ ID NO. 212 and SEQ ID NO. 214; and a DVD light chain amino acid sequence selected from the group consisting of SEQ ID NO. 213 and SEQ ID NO. 215. In an embodiment, the binding protein capable of binding EGFR (seq. 2) and RON (seq. 1) comprises a DVD heavy chain amino acid sequence of SEQ ID NO. 212 and a DVD light chain amino acid sequence of SEQ ID NO: 213. In another embodiment, the binding protein capable of binding EGFR (seq. 2) and RON (seq. 1) has a reverse orientation and comprises a DVD heavy chain amino acid sequence of SEQ ID NO. 214 and a DVD light chain amino acid sequence of SEQ ID NO: 215.

[0046] In an embodiment, the binding protein capable of binding EGFR (seq. 2) and HGF (seq. 1) comprises a DVD heavy chain amino acid sequence selected from the group consisting of SEQ ID NO. 216 and SEQ ID NO. 218; and a DVD light chain amino acid sequence selected from the group consisting of SEQ ID NO. 217 and SEQ ID NO. 219. In an embodiment, the binding protein capable of binding EGFR (seq. 2) and HGF (seq. 1) comprises a DVD heavy chain amino acid sequence of SEQ ID NO. 216 and a DVD light chain amino acid sequence of SEQ ID NO: 204. In another embodiment, the binding protein capable of binding EGFR (seq. 2) and HGF (seq. 1) has a reverse orientation and comprises a DVD heavy chain amino acid sequence of SEQ ID NO. 218 and a DVD light chain amino acid sequence of SEQ ID NO: 219.

[0047] In an embodiment, the binding protein capable of binding EGFR (seq. 1) and c-MET comprises a DVD heavy chain amino acid sequence selected from the group consisting of SEQ ID NO. 220 and SEQ ID NO. 222; and a DVD light chain amino acid sequence selected from the group consisting of SEQ ID NO. 221 and SEQ ID NO. 223. In an embodiment, the binding protein capable of binding EGFR (seq. 1) and c-MET comprises a DVD heavy chain amino acid sequence of SEQ ID NO. 220 and a DVD light chain amino acid sequence of SEQ ID NO: 221. In another embodiment, the binding protein capable of binding EGFR (seq. 1) and c-MET has a reverse orientation and comprises a DVD heavy chain amino acid sequence of SEQ ID NO. 222 and a DVD light chain amino acid sequence of SEQ ID NO: 223.

[0048] In an embodiment, the binding protein capable of binding HER-2 (seq. 1) and IGF1,2 comprises a DVD heavy chain amino acid sequence selected from the group consisting of SEQ ID NO. 224 and SEQ ID NO. 226; and a DVD light chain amino acid sequence selected from the group consisting of SEQ ID NO. 225 and SEQ ID NO. 227. In an embodiment, the binding protein capable of binding HER-2 (seq. 1) and IGF1,2 comprises a DVD heavy chain amino acid sequence of SEQ ID NO. 224 and a DVD light chain amino acid sequence of SEQ ID NO: 225. In another embodiment, the binding protein capable of binding HER-2 (seq. 1) and IGF1,2 has a reverse orientation and comprises a DVD heavy chain amino acid sequence of SEQ ID NO. 226 and a DVD light chain amino acid sequence of SEQ ID NO: 227.

[0049] In an embodiment, the binding protein capable of binding HER-2 (seq. 1) and IGF1R comprises a DVD heavy chain amino acid sequence selected from the group consisting of SEQ ID NO. 228 and SEQ ID NO. 230; and a DVD light chain amino acid sequence selected from the group consisting of SEQ ID NO. 229 and SEQ ID NO. 231. In an embodiment, the binding protein capable of binding HER-2 (seq. 1) and IGF1R comprises a DVD heavy chain amino acid sequence of SEQ ID NO. 228 and a DVD light chain amino acid sequence of SEQ ID NO: 229. In another embodiment, the binding protein capable of binding HER-2 (seq. 1) and IGF1R has a reverse orientation and comprises a DVD heavy chain amino acid sequence of SEQ ID NO. 230 and a DVD light chain amino acid sequence of SEQ ID NO: 231.

[0050] In an embodiment, the binding protein capable of binding RON (seq. 1) and HGF (seq. 1) comprises a DVD heavy chain amino acid sequence selected from the group consisting of SEQ ID NO. 232 and SEQ ID NO. 234; and a DVD light chain amino acid sequence selected from the group consisting of SEQ ID NO. 233 and SEQ ID NO. 235. In an embodiment, the binding protein capable of binding RON (seq. 1) and HGF (seq. 1) comprises a DVD heavy chain amino acid sequence of SEQ ID NO. 232 and a DVD light chain amino acid sequence of SEQ ID NO: 233. In another embodiment, the binding protein capable of binding RON (seq. 1) and HGF (seq. 1) has a reverse orientation and comprises a DVD heavy chain amino acid sequence of SEQ ID NO. 234 and a DVD light chain amino acid sequence of SEQ ID NO: 235.

[0051] In an embodiment, the binding protein capable of binding VEGF (seq. 1) and EGFR (seq. 2) comprises a DVD heavy chain amino acid sequence selected from the group consisting of SEQ ID NO. 236 and SEQ ID NO. 238; and a DVD light chain amino acid sequence selected from the group consisting of SEQ ID NO. 237 and SEQ ID NO. 239. In an embodiment, the binding protein capable of binding VEGF (seq. 1) and EGFR (seq. 2) comprises a DVD heavy chain amino acid sequence of SEQ ID NO. 236 and a DVD light chain amino acid sequence of SEQ ID NO: 237. In another embodiment, the binding protein capable of binding VEGF (seq. 1) and EGFR (seq. 2) has a reverse orientation and comprises a DVD heavy chain amino acid sequence of SEQ ID NO. 238 and a DVD light chain amino acid sequence of SEQ ID NO: 239.

[0052] In an embodiment, the binding protein capable of binding VEGF (seq. 1) and HER-2 (seq. 1) comprises a DVD heavy chain amino acid sequence selected from the group consisting of SEQ ID NO. 240 and SEQ ID NO. 242; and a DVD light chain amino acid sequence selected from the group consisting of SEQ ID NO. 241 and SEQ ID NO. 243. In an embodiment, the binding protein capable of binding VEGF (seq. 1) and HER-2 (seq. 1) comprises a DVD heavy chain amino acid sequence of SEQ ID NO. 240 and a DVD light chain amino acid sequence of SEQ ID NO: 241. In another embodiment, the binding protein capable of binding VEGF (seq. 1) and HER-2 (seq. 1) has a reverse orientation and comprises a DVD heavy chain amino acid sequence of SEQ ID NO. 242 and a DVD light chain amino acid sequence of SEQ ID NO: 243.

[0053] In an embodiment, the binding protein capable of binding VEGF (seq. 1) and CD-20 comprises a DVD heavy chain amino acid sequence selected from the group consisting of SEQ ID NO. 244 and SEQ ID NO. 246; and a DVD light chain amino acid sequence selected from the group consisting of SEQ ID NO. 245 and SEQ ID NO. 247. In an embodiment, the binding protein capable of binding VEGF (seq. 1) and CD-20 comprises a DVD heavy chain amino acid sequence of SEQ ID NO. 244 and a DVD light chain amino acid sequence of SEQ ID NO: 245. In another embodiment, the binding protein capable of binding VEGF (seq. 1) and CD-20 has a reverse orientation and comprises a DVD heavy chain amino acid sequence of SEQ ID NO. 246 and a DVD light chain amino acid sequence of SEQ ID NO: 247.

[0054] In an embodiment, the binding protein capable of binding VEGF (seq. 1) and IGF1,2 comprises a DVD heavy chain amino acid sequence selected from the group consisting of SEQ ID NO. 248 and SEQ ID NO. 250; and a DVD light chain amino acid sequence selected from the group consisting of SEQ ID NO. 249 and SEQ ID NO. 251. In an embodiment, the binding protein capable of binding VEGF (seq. 1) and IGF1,2 comprises a DVD heavy chain amino acid sequence of SEQ ID NO. 248 and a DVD light chain amino acid sequence of SEQ ID NO: 249. In another embodiment, the binding protein capable of binding VEGF (seq. 1) and IGF1,2 has a reverse orientation and comprises a DVD heavy chain amino acid sequence of SEQ ID NO. 250 and a DVD light chain amino acid sequence of SEQ ID NO: 251.

[0055] In an embodiment, the binding protein capable of binding VEGF (seq. 1) and DLL-4 (seq. 1) comprises a DVD heavy chain amino acid sequence selected from the group consisting of SEQ ID NO. 252 and SEQ ID NO. 254; and a DVD light chain amino acid sequence selected from the group consisting of SEQ ID NO. 253 and SEQ ID NO. 255. In an embodiment, the binding protein capable of binding VEGF (seq. 1) and DLL-4 (seq. 1) comprises a DVD heavy chain amino acid sequence of SEQ ID NO. 252 and a DVD light chain amino acid sequence of SEQ ID NO: 253. In another embodiment, the binding protein capable of binding VEGF (seq. 1) and DLL-4 (seq. 1) has a reverse orientation and comprises a DVD heavy chain amino acid sequence of SEQ ID NO. 254 and a DVD light chain amino acid sequence of SEQ ID NO: 255.

[0056] In an embodiment, the binding protein capable of binding VEGF (seq. 1) and HGF (seq. 1) comprises a DVD heavy chain amino acid sequence selected from the group consisting of SEQ ID NO. 256 and SEQ ID NO. 258; and a DVD light chain amino acid sequence selected from the group consisting of SEQ ID NO. 257 and SEQ ID NO. 259. In an embodiment, the binding protein capable of binding VEGF (seq. 1) and HGF (seq. 1) comprises a DVD heavy chain amino acid sequence of SEQ ID NO. 256 and a DVD light chain amino acid sequence of SEQ ID NO: 244. In another embodiment, the binding protein capable of binding VEGF (seq. 1) and HGF (seq. 1) has a reverse orientation and comprises a DVD heavy chain amino acid sequence of SEQ ID NO. 258 and a DVD light chain amino acid sequence of SEQ ID NO: 259.

[0057] In a second embodiment, the binding protein capable of binding VEGF (seq. 1) and HGF (seq. 1) comprises a DVD heavy chain amino acid sequence selected from the group consisting of SEQ ID NO. 260 and SEQ ID NO. 262; and a DVD light chain amino acid sequence selected from the group consisting of SEQ ID NO. 261 and SEQ ID NO. 263. In an embodiment, the binding protein capable of binding VEGF (seq. 1) and HGF (seq. 1) comprises a DVD heavy chain amino acid sequence of SEQ ID NO. 260 and a DVD light chain amino acid sequence of SEQ ID NO: 261. In another embodiment, the binding protein capable of binding VEGF (seq. 1) and HGF (seq. 1) has a reverse orientation and comprises a DVD heavy chain amino acid sequence of SEQ ID NO. 262 and a DVD light chain amino acid sequence of SEQ ID NO: 263.

[0058] In a third embodiment, the binding protein capable of binding VEGF (seq. 1) and HGF (seq. 1) comprises a DVD heavy chain amino acid sequence selected from the group consisting of SEQ ID NO. 264 and SEQ ID NO. 266; and a DVD light chain amino acid sequence selected from the group consisting of SEQ ID NO. 265 and SEQ ID NO. 267. In an embodiment, the binding protein capable of binding VEGF (seq. 1) and HGF (seq. 1) comprises a DVD heavy chain amino acid sequence of SEQ ID NO. 264 and a DVD light chain amino acid sequence of SEQ ID NO: 265. In another embodiment, the binding protein capable of binding VEGF (seq. 1) and HGF (seq. 1) has a reverse orientation and comprises a DVD heavy chain amino acid sequence of SEQ ID NO. 266 and a DVD light chain amino acid sequence of SEQ ID NO: 267.

[0059] In a fourth embodiment, the binding protein capable of binding VEGF (seq. 1) and HGF (seq. 1) comprises a DVD heavy chain amino acid sequence selected from the group consisting of SEQ ID NO. 268 and SEQ ID NO. 270; and a DVD light chain amino acid sequence selected from the group consisting of SEQ ID NO. 269 and SEQ ID NO. 271. In an embodiment, the binding protein capable of binding VEGF (seq. 1) and HGF (seq. 1) comprises a DVD heavy chain amino acid sequence of SEQ ID NO. 268 and a DVD light chain amino acid sequence of SEQ ID NO: 269. In another embodiment, the binding protein capable of binding VEGF (seq. 1) and HGF (seq. 1) has a reverse orientation and comprises a DVD heavy chain amino acid sequence of SEQ ID NO. 270 and a DVD light chain amino acid sequence of SEQ ID NO: 271.

[0060] In an embodiment, the binding protein capable of binding VEGF (seq. 1) and RON (seq. 1) comprises a DVD heavy chain amino acid sequence selected from the group consisting of SEQ ID NO. 272 and SEQ ID NO. 274; and a DVD light chain amino acid sequence selected from the group consisting of SEQ ID NO. 273 and SEQ ID NO. 275. In an embodiment, the binding protein capable of binding VEGF (seq. 1) and RON (seq. 1) comprises a DVD heavy chain amino acid sequence of SEQ ID NO. 272 and a DVD light chain amino acid sequence of SEQ ID NO: 273. In another embodiment, the binding protein capable of binding VEGF (seq. 1) and RON (seq. 1) has a reverse orientation and comprises a DVD heavy chain amino acid sequence of SEQ ID NO. 274 and a DVD light chain amino acid sequence of SEQ ID NO: 275.

[0061] In an embodiment, the binding protein capable of binding VEGF (seq. 1) and NRP1 (seq. 1) comprises a DVD heavy chain amino acid sequence selected from the group consisting of SEQ ID NO. 276 and SEQ ID NO. 278; and a DVD light chain amino acid sequence selected from the group consisting of SEQ ID NO. 277 and SEQ ID NO. 279. In an embodiment, the binding protein capable of binding VEGF (seq. 1) and NRP1 (seq. 1) comprises a DVD heavy chain amino acid sequence of SEQ ID NO. 276 and a DVD light chain amino acid sequence of SEQ ID NO: 277. In another embodiment, the binding protein capable of binding VEGF (seq. 1) and NRP1 (seq. 1) has a reverse orientation and comprises a DVD heavy chain amino acid sequence of SEQ ID NO. 278 and a DVD light chain amino acid sequence of SEQ ID NO: 279.

[0062] In an embodiment, the binding protein capable of binding RON (seq. 2) and HGF (seq. 1) comprises a DVD heavy chain amino acid sequence selected from the group consisting of SEQ ID NO. 280 and SEQ ID NO. 282; and a DVD light chain amino acid sequence selected from the group consisting of SEQ ID NO. 281 and SEQ ID NO. 282. In an embodiment, the binding protein capable of binding RON (seq. 2) and HGF (seq. 1) comprises a DVD heavy chain amino acid sequence of SEQ ID NO. 280 and a DVD light chain amino acid sequence of SEQ ID NO: 281. In another embodiment, the binding protein capable of binding RON (seq. 2) and HGF (seq. 1) has a reverse orientation and comprises a DVD heavy chain amino acid sequence of SEQ ID NO. 282 and a DVD light chain amino acid sequence of SEQ ID NO: 283.

[0063] In an embodiment, the binding protein capable of binding RON (seq. 2) and EGFR (seq. 2) comprises a DVD heavy chain amino acid sequence selected from the group consisting of SEQ ID NO. 284 and SEQ ID NO. 286; and a DVD light chain amino acid sequence selected from the group consisting of SEQ ID NO. 285 and SEQ ID NO. 287. In an embodiment, the binding protein capable of binding RON (seq. 2) and EGFR (seq. 2) comprises a DVD heavy chain amino acid sequence of SEQ ID NO. 284 and a DVD light chain amino acid sequence of SEQ ID NO: 285. In another embodiment, the binding protein capable of binding RON (seq. 2) and EGFR (seq. 2) has a reverse orientation and comprises a DVD heavy chain amino acid sequence of SEQ ID NO. 286 and a DVD light chain amino acid sequence of SEQ ID NO: 287.

[0064] In an embodiment, the binding protein capable of binding RON (seq. 2) and VEGF (seq. 1) comprises a DVD heavy chain amino acid sequence selected from the group consisting of SEQ ID NO. 288 and SEQ ID NO. 290; and a DVD light chain amino acid sequence selected from the group consisting of SEQ ID NO. 289 and SEQ ID NO. 291. In an embodiment, the binding protein capable of binding RON (seq. 2) and VEGF (seq. 1) comprises a DVD heavy chain amino acid sequence of SEQ ID NO. 288 and a DVD light chain amino acid sequence of SEQ ID NO: 289. In another embodiment, the binding protein capable of binding RON (seq. 2) and VEGF (seq. 1) has a reverse orientation and comprises a DVD heavy chain amino acid sequence of SEQ ID NO. 290 and a DVD light chain amino acid sequence of SEQ ID NO: 291.

[0065] In an embodiment, the binding protein capable of binding EGFR (seq. 1) and HER-2 (seq. 1) comprises a DVD heavy chain amino acid sequence selected from the group consisting of SEQ ID NO. 292 and SEQ ID NO. 294; and a DVD light chain amino acid sequence selected from the group consisting of SEQ ID NO. 293 and SEQ ID NO. 295. In an embodiment, the binding protein capable of binding EGFR (seq. 1) and HER-2 (seq. 1) comprises a DVD heavy chain amino acid sequence of SEQ ID NO. 292 and a DVD light chain amino acid sequence of SEQ ID NO: 293. In another embodiment, the binding protein capable of binding EGFR (seq. 1) and HER-2 (seq. 1) has a reverse orientation and comprises a DVD heavy chain amino acid sequence of SEQ ID NO. 294 and a DVD light chain amino acid sequence of SEQ ID NO: 295.

[0066] In an embodiment, the binding protein capable of binding EGFR (seq. 1) and CD-3 (seq. 1) comprises a DVD heavy chain amino acid sequence selected from the group consisting of SEQ ID NO. 296 and SEQ ID NO. 298; and a DVD light chain amino acid sequence selected from the group consisting of SEQ ID NO. 297 and SEQ ID NO. 299. In an embodiment, the binding protein capable of binding EGFR (seq. 1) and CD-3 (seq. 1) comprises a DVD heavy chain amino acid sequence of SEQ ID NO. 296 and a DVD light chain amino acid sequence of SEQ ID NO: 297. In another embodiment, the binding protein capable of binding EGFR (seq. 1) and CD-3 (seq. 1) has a reverse orientation and comprises a DVD heavy chain amino acid sequence of SEQ ID NO. 298 and a DVD light chain amino acid sequence of SEQ ID NO: 299.

[0067] In an embodiment, the binding protein capable of binding EGFR (seq. 1) and IGF1R comprises a DVD heavy chain amino acid sequence selected from the group consisting of SEQ ID NO. 300 and SEQ ID NO. 302; and a DVD light chain amino acid sequence selected from the group consisting of SEQ ID NO. 301 and SEQ ID NO. 303. In an embodiment, the binding protein capable of binding EGFR (seq. 1) and IGF1R comprises a DVD heavy chain amino acid sequence of SEQ ID NO. 300 and a DVD light chain amino acid sequence of SEQ ID NO: 301. In another embodiment, the binding protein capable of binding EGFR (seq. 1) and IGF1R has a reverse orientation and comprises a DVD heavy chain amino acid sequence of SEQ ID NO. 302 and a DVD light chain amino acid sequence of SEQ ID NO: 303.

[0068] In an embodiment, the binding protein capable of binding EGFR (seq. 1) and RON (seq. 1) comprises a DVD heavy chain amino acid sequence selected from the group consisting of SEQ ID NO. 304 and SEQ ID NO. 306; and a DVD light chain amino acid sequence selected from the group consisting of SEQ ID NO. 305 and SEQ ID NO. 307. In an embodiment, the binding protein capable of binding EGFR (seq. 1) and RON (seq. 1) comprises a DVD heavy chain amino acid sequence of SEQ ID NO. 304 and a DVD light chain amino acid sequence of SEQ ID NO: 305. In another embodiment, the binding protein capable of binding EGFR (seq. 1) and RON (seq. 1) has a reverse orientation and comprises a DVD heavy chain amino acid sequence of SEQ ID NO. 306 and a DVD light chain amino acid sequence of SEQ ID NO: 307.

[0069] In an embodiment, the binding protein capable of binding EGFR (seq. 1) and RON (seq. 2) comprises a DVD heavy chain amino acid sequence selected from the group consisting of SEQ ID NO. 308 and SEQ ID NO. 310; and a DVD light chain amino acid sequence selected from the group consisting of SEQ ID NO. 309 and SEQ ID NO. 311. In an embodiment, the binding protein capable of binding EGFR (seq. 1) and RON (seq. 2) comprises a DVD heavy chain amino acid sequence of SEQ ID NO. 308 and a DVD light chain amino acid sequence of SEQ ID NO: 309. In another embodiment, the binding protein capable of binding EGFR (seq. 1) and RON (seq. 2) has a reverse orientation and comprises a DVD heavy chain amino acid sequence of SEQ ID NO. 310 and a DVD light chain amino acid sequence of SEQ ID NO: 311.

[0070] In an embodiment, the binding protein capable of binding EGFR (seq. 1) and HGF (seq. 1) comprises a DVD heavy chain amino acid sequence selected from the group consisting of SEQ ID NO. 312 and SEQ ID NO. 314; and a DVD light chain amino acid sequence selected from the group consisting of SEQ ID NO. 313 and SEQ ID NO. 315. In an embodiment, the binding protein capable of binding EGFR (seq. 1) and HGF (seq. 1) comprises a DVD heavy chain amino acid sequence of SEQ ID NO. 312 and a DVD light chain amino acid sequence of SEQ ID NO: 313. In another embodiment, the binding protein capable of binding EGFR (seq. 1) and HGF (seq. 1) has a reverse orientation and comprises a DVD heavy chain amino acid sequence of SEQ ID NO. 314 and a DVD light chain amino acid sequence of SEQ ID NO: 315.

[0071] In an embodiment, the binding protein capable of binding EGFR (seq. 1) and c-MET comprises a DVD heavy chain amino acid sequence selected from the group consisting of SEQ ID NO. 316 and SEQ ID NO. 318; and a DVD light chain amino acid sequence selected from the group consisting of SEQ ID NO. 317 and SEQ ID NO. 319. In an embodiment, the binding protein capable of binding EGFR (seq. 1) and c-MET comprises a DVD heavy chain amino acid sequence of SEQ ID NO. 316 and a DVD light chain amino acid sequence of SEQ ID NO: 317. In another embodiment, the binding protein capable of binding EGFR (seq. 1 and c-MET has a reverse orientation and comprises a DVD heavy chain amino acid sequence of SEQ ID NO. 318 and a DVD light chain amino acid sequence of SEQ ID NO: 319.

[0072] In an embodiment, the binding protein capable of binding EGFR (seq. 1) and VEGF (seq. 1) comprises a DVD heavy chain amino acid sequence selected from the group consisting of SEQ ID NO. 320 and SEQ ID NO. 322; and a DVD light chain amino acid sequence selected from the group consisting of SEQ ID NO. 321 and SEQ ID NO. 323. In an embodiment, the binding protein capable of binding EGFR (seq. 1) and VEGF (seq. 1) comprises a DVD heavy chain amino acid sequence of SEQ ID NO. 320 and a DVD light chain amino acid sequence of SEQ ID NO: 321. In another embodiment, the binding protein capable of binding EGFR (seq. 1) and VEGF (seq. 1) has a reverse orientation and comprises a DVD heavy chain amino acid sequence of SEQ ID NO. 322 and a DVD light chain amino acid sequence of SEQ ID NO: 3230.

[0073] In an embodiment, the binding protein capable of binding NRP1 (seq. 2) and VEGF (seq. 1) comprises a DVD heavy chain amino acid sequence selected from the group consisting of SEQ ID NO. 324 and SEQ ID NO. 326; and a DVD light chain amino acid sequence selected from the group consisting of SEQ ID NO. 325 and SEQ ID NO. 327. In an embodiment, the binding protein capable of binding NRP1 (seq. 2) and VEGF (seq. 1) comprises a DVD heavy chain amino acid sequence of SEQ ID NO. 324 and a DVD light chain amino acid sequence of SEQ ID NO: 325. In another embodiment, the binding protein capable of binding NRP1 (seq. 2) and VEGF (seq. 1) has a reverse orientation and comprises a DVD heavy chain amino acid sequence of SEQ ID NO. 326 and a DVD light chain amino acid sequence of SEQ ID NO: 327.

[0074] In an embodiment, the binding protein capable of binding CD-3 (seq. 2) and CD-20 comprises a DVD heavy chain amino acid sequence selected from the group consisting of SEQ ID NO. 328 and SEQ ID NO. 330; and a DVD light chain amino acid sequence selected from the group consisting of SEQ ID NO. 329 and SEQ ID NO. 331. In an embodiment, the binding protein capable of binding CD-3 (seq. 2) and CD-20 comprises a DVD heavy chain amino acid sequence of SEQ ID NO. 328 and a DVD light chain amino acid sequence of SEQ ID NO: 329. In another embodiment, the binding protein capable of binding CD-3 (seq. 2) and CD-20 has a reverse orientation and comprises a DVD heavy chain amino acid sequence of SEQ ID NO. 330 and a DVD light chain amino acid sequence of SEQ ID NO: 331.

[0075] In an embodiment, the binding protein capable of binding CD-3 (seq. 2) and HER-2 (seq. 1) comprises a DVD heavy chain amino acid sequence selected from the group consisting of SEQ ID NO: 332 and SEQ ID NO: 334; and a DVD light chain amino acid sequence selected from the group consisting of SEQ ID NO: 333 and SEQ ID NO: 335. In an embodiment, the binding protein capable of binding CD-3 (seq. 2) and HER-2 (seq. 1) comprises a DVD heavy chain amino acid sequence of SEQ ID NO. 332 and a DVD light chain amino acid sequence of SEQ ID NO: 333. In another embodiment, the binding protein capable of binding CD-3 (seq. 2) and HER-2 (seq. 1) has a reverse orientation and comprises a DVD heavy chain amino acid sequence of SEQ ID NO: 334 and a DVD light chain amino acid sequence of SEQ ID NO: 335.

[0076] In an embodiment, the binding protein capable of binding CD-3 (seq. 2) and CD-19 comprises a DVD heavy chain amino acid sequence selected from the group consisting of SEQ ID NO. 336 and SEQ ID NO. 338; and a DVD light chain amino acid sequence selected from the group consisting of SEQ ID NO. 337 and SEQ ID NO. 339. In an embodiment, the binding protein capable of binding CD-3 (seq. 2) and CD-19 comprises a DVD heavy chain amino acid sequence of SEQ ID NO. 336 and a DVD light chain amino acid sequence of SEQ ID NO: 337. In another embodiment, the binding protein capable of binding CD-3 (seq. 2) and CD-19 has a reverse orientation and comprises a DVD heavy chain amino acid sequence of SEQ ID NO. 338 and a DVD light chain amino acid sequence of SEQ ID NO: 339.

[0077] In an embodiment, the binding protein capable of binding CD-3 (seq. 2) and EGFR (seq. 2) comprises a DVD heavy chain amino acid sequence selected from the group consisting of SEQ ID NO. 340 and SEQ ID NO. 342; and a DVD light chain amino acid sequence selected from the group consisting of SEQ ID NO. 341 and SEQ ID NO. 343. In an embodiment, the binding protein capable of binding CD-3 (seq. 2) and EGFR (seq. 2) comprises a DVD heavy chain amino acid sequence of SEQ ID NO. 340 and a DVD light chain amino acid sequence of SEQ ID NO: 341. In another embodiment, the binding protein capable of binding CD-3 (seq. 2) and EGFR (seq. 2) has a reverse orientation and comprises a DVD heavy chain amino acid sequence of SEQ ID NO. 342 and a DVD light chain amino acid sequence of SEQ ID NO: 343.

[0078] In an embodiment, the binding protein capable of binding CD-3 (seq. 2) and EGFR (seq. 1) comprises a DVD heavy chain amino acid sequence selected from the group consisting of SEQ ID NO. 344 and SEQ ID NO. 346; and a DVD light chain amino acid sequence selected from the group consisting of SEQ ID NO. 345 and SEQ ID NO. 347. In an embodiment, the binding protein capable of binding CD-3 (seq. 2) and EGFR (seq. 1) comprises a DVD heavy chain amino acid sequence of SEQ ID NO. 344 and a DVD light chain amino acid sequence of SEQ ID NO: 345. In another embodiment, the binding protein capable of binding CD-3 (seq. 2) and EGFR (seq. 1) has a reverse orientation and comprises a DVD heavy chain amino acid sequence of SEQ ID NO. 346 and a DVD light chain amino acid sequence of SEQ ID NO: 347.

[0079] In an embodiment, the binding protein capable of binding EGFR (seq. 1) and IGF1,2 comprises a DVD heavy chain amino acid sequence selected from the group consisting of SEQ ID NO. 348 and SEQ ID NO. 350; and a DVD light chain amino acid sequence selected from the group consisting of SEQ ID NO. 349 and SEQ ID NO. 351. In an embodiment, the binding protein capable of binding EGFR (seq. 1) and IGF1,2 comprises a DVD heavy chain amino acid sequence of SEQ ID NO. 348 and a DVD light chain amino acid sequence of SEQ ID NO: 349. In another embodiment, the binding protein capable of binding EGFR (seq. 1) and IGF1,2 has a reverse orientation and comprises a DVD heavy chain amino acid sequence of SEQ ID NO. 350 and a DVD light chain amino acid sequence of SEQ ID NO: 351.

[0080] In an embodiment, the binding protein capable of binding DLL-4 (seq. 1) and PLGF (seq. 1) comprises a DVD heavy chain amino acid sequence selected from the group consisting of SEQ ID NO. 352 and SEQ ID NO. 354; and a DVD light chain amino acid sequence selected from the group consisting of SEQ ID NO. 353 and SEQ ID NO. 355. In an embodiment, the binding protein capable of binding DLL-4 (seq. 1) and PLGF (seq. 1) comprises a DVD heavy chain amino acid sequence of SEQ ID NO. 352 and a DVD light chain amino acid sequence of SEQ ID NO: 353. In another embodiment, the binding protein capable of binding DLL-4 (seq. 1) and PLGF (seq. 1) has a reverse orientation and comprises a DVD heavy chain amino acid sequence of SEQ ID NO. 354 and a DVD light chain amino acid sequence of SEQ ID NO: 355.

[0081] In an embodiment, the binding protein capable of binding VEGF (seq. 1) and PLGF (seq. 1) comprises a DVD heavy chain amino acid sequence selected from the group consisting of SEQ ID NO. 356 and SEQ ID NO. 358; and a DVD light chain amino acid sequence selected from the group consisting of SEQ ID NO. 357 and SEQ ID NO. 359. In an embodiment, the binding protein capable of binding VEGF (seq. 1) and PLGF (seq. 1) comprises a DVD heavy chain amino acid sequence of SEQ ID NO. 356 and a DVD light chain amino acid sequence of SEQ ID NO: 357. In another embodiment, the binding protein capable of binding VEGF (seq. 1) and PLGF (seq. 1) has a reverse orientation and comprises a DVD heavy chain amino acid sequence of SEQ ID NO. 358 and a DVD light chain amino acid sequence of SEQ ID NO: 359.

[0082] In a second embodiment, the binding protein capable of binding VEGF (seq. 1) and PLGF (seq. 1) comprises a DVD heavy chain amino acid sequence selected from the group consisting of SEQ ID NO. 360 and SEQ ID NO. 362; and a DVD light chain amino acid sequence selected from the group consisting of SEQ ID NO. 361 and SEQ ID NO. 363. In an embodiment, the binding protein capable of binding VEGF (seq. 1) and PLGF (seq. 1) comprises a DVD heavy chain amino acid sequence of SEQ ID NO. 360 and a DVD light chain amino acid sequence of SEQ ID NO: 361. In another embodiment, the binding protein capable of binding VEGF (seq. 1) and PLGF (seq. 1) has a reverse orientation and comprises a DVD heavy chain amino acid sequence of SEQ ID NO. 362 and a DVD light chain amino acid sequence of SEQ ID NO: 363.

[0083] In a third embodiment, the binding protein capable of binding VEGF (seq. 1) and PLGF (seq. 1) comprises a DVD heavy chain amino acid sequence selected from the group consisting of SEQ ID NO. 364 and SEQ ID NO. 366; and a DVD light chain amino acid sequence selected from the group consisting of SEQ ID NO. 365 and SEQ ID NO. 367. In an embodiment, the binding protein capable of binding VEGF (seq. 1) and PLGF (seq. 1) comprises a DVD heavy chain amino acid sequence of SEQ ID NO. 364 and a DVD light chain amino acid sequence of SEQ ID NO: 365. In another embodiment, the binding protein capable of binding VEGF (seq. 1) and PLGF (seq. 1) has a reverse orientation and comprises a DVD heavy chain amino acid sequence of SEQ ID NO. 366 and a DVD light chain amino acid sequence of SEQ ID NO: 367.

[0084] In a fourth embodiment, the binding protein capable of binding VEGF (seq. 1) and PLGF (seq. 1) comprises a DVD heavy chain amino acid sequence selected from the group consisting of SEQ ID NO. 368 and SEQ ID NO. 370; and a DVD light chain amino acid sequence selected from the group consisting of SEQ ID NO. 369 and SEQ ID NO. 371. In an embodiment, the binding protein capable of binding VEGF (seq. 1) and PLGF (seq. 1) comprises a DVD heavy chain amino acid sequence of SEQ ID NO. 368 and a DVD light chain amino acid sequence of SEQ ID NO: 369. In another embodiment, the binding protein capable of binding VEGF (seq. 1) and PLGF (seq. 1) has a reverse orientation and comprises a DVD heavy chain amino acid sequence of SEQ ID NO. 370 and a DVD light chain amino acid sequence of SEQ ID NO: 371.

[0085] In an embodiment, the binding protein capable of binding EGFR (seq. 2) and ErbB3 (seq. 1) comprises a DVD heavy chain amino acid sequence selected from the group consisting of SEQ ID NO. 372 and SEQ ID NO. 374; and a DVD light chain amino acid sequence selected from the group consisting of SEQ ID NO. 373 and SEQ ID NO. 375. In an embodiment, the binding protein capable of binding EGFR (seq. 2) and ErbB3 (seq. 1) comprises a DVD heavy chain amino acid sequence of SEQ ID NO. 372 and a DVD light chain amino acid sequence of SEQ ID NO: 373. In another embodiment, the binding protein capable of binding EGFR (seq. 2) and ErbB3 (seq. 1) has a reverse orientation and comprises a DVD heavy chain amino acid sequence of SEQ ID NO. 374 and a DVD light chain amino acid sequence of SEQ ID NO: 375.

[0086] In a second embodiment, the binding protein capable of binding EGFR (seq. 2) and ErbB3 (seq. 1) comprises a DVD heavy chain amino acid sequence selected from the group consisting of SEQ ID NO. 376 and SEQ ID NO. 378; and a DVD light chain amino acid sequence selected from the group consisting of SEQ ID NO. 377 and SEQ ID NO. 379. In an embodiment, the binding protein capable of binding EGFR (seq. 2) and ErbB3 (seq. 1) comprises a DVD heavy chain amino acid sequence of SEQ ID NO. 376 and a DVD light chain amino acid sequence of SEQ ID NO: 377. In another embodiment, the binding protein capable of binding EGFR (seq. 2) and ErbB3 (seq. 1) has a reverse orientation and comprises a DVD heavy chain amino acid sequence of SEQ ID NO. 378 and a DVD light chain amino acid sequence of SEQ ID NO: 379.

[0087] In a third embodiment, the binding protein capable of binding EGFR (seq. 2) and ErbB3 (seq. 1) comprises a DVD heavy chain amino acid sequence selected from the group consisting of SEQ ID NO. 380 and SEQ ID NO. 382; and a DVD light chain amino acid sequence selected from the group consisting of SEQ ID NO. 381 and SEQ ID NO. 383. In an embodiment, the binding protein capable of binding EGFR (seq. 2) and ErbB3 (seq. 1) comprises a DVD heavy chain amino acid sequence of SEQ ID NO. 380 and a DVD light chain amino acid sequence of SEQ ID NO: 381. In another embodiment, the binding protein capable of binding EGFR (seq. 2) and ErbB3 (seq. 1) has a reverse orientation and comprises a DVD heavy chain amino acid sequence of SEQ ID NO. 382 and a DVD light chain amino acid sequence of SEQ ID NO: 383.

[0088] In a fourth embodiment, the binding protein capable of binding EGFR (seq. 2) and ErbB3 (seq. 1) comprises a DVD heavy chain amino acid sequence selected from the group consisting of SEQ ID NO. 384 and SEQ ID NO. 386; and a DVD light chain amino acid sequence selected from the group consisting of SEQ ID NO. 385 and SEQ ID NO. 387. In an embodiment, the binding protein capable of binding EGFR (seq. 2) and ErbB3 (seq. 1) comprises a DVD heavy chain amino acid sequence of SEQ ID NO. 384 and a DVD light chain amino acid sequence of SEQ ID NO: 385. In another embodiment, the binding protein capable of binding EGFR (seq. 2) and ErbB3 (seq. 1) has a reverse orientation and comprises a DVD heavy chain amino acid sequence of SEQ ID NO. 386 and a DVD light chain amino acid sequence of SEQ ID NO: 387.

[0089] In an embodiment, the binding protein capable of binding EGFR (seq. 1) and ErbB3 (seq. 1) comprises a DVD heavy chain amino acid sequence selected from the group consisting of SEQ ID NO. 388 and SEQ ID NO. 390; and a DVD light chain amino acid sequence selected from the group consisting of SEQ ID NO. 389 and SEQ ID NO. 391. In an embodiment, the binding protein capable of binding EGFR (seq. 1) and ErbB3 (seq. 1) comprises a DVD heavy chain amino acid sequence of SEQ ID NO. 388 and a DVD light chain amino acid sequence of SEQ ID NO: 389. In another embodiment, the binding protein capable of binding EGFR (seq. 1) and ErbB3 (seq. 1) has a reverse orientation and comprises a DVD heavy chain amino acid sequence of SEQ ID NO. 390 and a DVD light chain amino acid sequence of SEQ ID NO: 391.

[0090] In an embodiment, the binding protein capable of binding HGF (seq. 1) and ErbB3 (seq. 1) comprises a DVD heavy chain amino acid sequence selected from the group consisting of SEQ ID NO. 392 and SEQ ID NO. 394; and a DVD light chain amino acid sequence selected from the group consisting of SEQ ID NO. 393 and SEQ ID NO. 395. In an embodiment, the binding protein capable of binding HGF (seq. 1) and ErbB3 (seq. 1) comprises a DVD heavy chain amino acid sequence of SEQ ID NO. 392 and a DVD light chain amino acid sequence of SEQ ID NO: 393. In another embodiment, the binding protein capable of binding HGF (seq. 1) and ErbB3 (seq. 1) has a reverse orientation and comprises a DVD heavy chain amino acid sequence of SEQ ID NO. 394 and a DVD light chain amino acid sequence of SEQ ID NO: 395.

[0091] In an embodiment, the binding protein capable of binding EGFR (seq. 2) and ErbB3 (seq. 2) comprises a DVD heavy chain amino acid sequence selected from the group consisting of SEQ ID NO. 396 and SEQ ID NO. 398; and a DVD light chain amino acid sequence selected from the group consisting of SEQ ID NO. 397 and SEQ ID NO. 399. In an embodiment, the binding protein capable of binding EGFR (seq. 2) and ErbB3 (seq. 2) comprises a DVD heavy chain amino acid sequence of SEQ ID NO. 396 and a DVD light chain amino acid sequence of SEQ ID NO: 397. In another embodiment, the binding protein capable of binding EGFR (seq. 2) and ErbB3 (seq. 2) has a reverse orientation and comprises a DVD heavy chain amino acid sequence of SEQ ID NO. 398 and a DVD light chain amino acid sequence of SEQ ID NO: 399.

[0092] In a second embodiment, the binding protein capable of binding EGFR (seq. 2) and ErbB3 (seq. 2) comprises a DVD heavy chain amino acid sequence selected from the group consisting of SEQ ID NO. 400 and SEQ ID NO. 402; and a DVD light chain amino acid sequence selected from the group consisting of SEQ ID NO. 401 and SEQ ID NO. 403. In an embodiment, the binding protein capable of binding EGFR (seq. 2) and ErbB3 (seq. 2) comprises a DVD heavy chain amino acid sequence of SEQ ID NO. 400 and a DVD light chain amino acid sequence of SEQ ID NO: 401. In another embodiment, the binding protein capable of binding EGFR (seq. 2) and ErbB3 (seq. 2) has a reverse orientation and comprises a DVD heavy chain amino acid sequence of SEQ ID NO. 402 and a DVD light chain amino acid sequence of SEQ ID NO: 403.

[0093] In a third embodiment, the binding protein capable of binding EGFR (seq. 2) and ErbB3 (seq. 2) comprises a DVD heavy chain amino acid sequence selected from the group consisting of SEQ ID NO. 404 and SEQ ID NO. 406; and a DVD light chain amino acid sequence selected from the group consisting of SEQ ID NO. 405 and SEQ ID NO. 407. In an embodiment, the binding protein capable of binding EGFR (seq. 2) and ErbB3 (seq. 2) comprises a DVD heavy chain amino acid sequence of SEQ ID NO. 404 and a DVD light chain amino acid sequence of SEQ ID NO: 405. In another embodiment, the binding protein capable of binding EGFR (seq. 2) and ErbB3 (seq. 2) has a reverse orientation and comprises a DVD heavy chain amino acid sequence of SEQ ID NO. 406 and a DVD light chain amino acid sequence of SEQ ID NO: 407.

[0094] In a fourth embodiment, the binding protein capable of binding EGFR (seq. 2) and ErbB3 (seq. 2) comprises a DVD heavy chain amino acid sequence selected from the group consisting of SEQ ID NO. 408 and SEQ ID NO. 410; and a DVD light chain amino acid sequence selected from the group consisting of SEQ ID NO. 409 and SEQ ID NO. 411. In an embodiment, the binding protein capable of binding EGFR (seq. 2) and ErbB3 (seq. 2) comprises a DVD heavy chain amino acid sequence of SEQ ID NO. 408 and a DVD light chain amino acid sequence of SEQ ID NO: 409. In another embodiment, the binding protein capable of binding EGFR (seq. 2) and ErbB3 (seq. 2) has a reverse orientation and comprises a DVD heavy chain amino acid sequence of SEQ ID NO. 410 and a DVD light chain amino acid sequence of SEQ ID NO: 411.

[0095] In an embodiment, the binding protein capable of binding EGFR (seq. 1) and ErbB3 (seq. 2) comprises a DVD heavy chain amino acid sequence selected from the group consisting of SEQ ID NO. 412 and SEQ ID NO. 414; and a DVD light chain amino acid sequence selected from the group consisting of SEQ ID NO. 413 and SEQ ID NO. 415. In an embodiment, the binding protein capable of binding EGFR (seq. 1) and ErbB3 (seq. 2) comprises a DVD heavy chain amino acid sequence of SEQ ID NO. 412 and a DVD light chain amino acid sequence of SEQ ID NO: 413. In another embodiment, the binding protein capable of binding EGFR (seq. 1) and ErbB3 (seq. 2) has a reverse orientation and comprises a DVD heavy chain amino acid sequence of SEQ ID NO. 414 and a DVD light chain amino acid sequence of SEQ ID NO: 415.

[0096] In an embodiment, the binding protein capable of binding HGF (seq. 1) and ErbB3 (seq. 2) comprises a DVD heavy chain amino acid sequence selected from the group consisting of SEQ ID NO. 416 and SEQ ID NO. 418; and a DVD light chain amino acid sequence selected from the group consisting of SEQ ID NO. 417 and SEQ ID NO. 419. In an embodiment, the binding protein capable of binding HGF (seq. 1) and ErbB3 (seq. 2) comprises a DVD heavy chain amino acid sequence of SEQ ID NO. 416 and a DVD light chain amino acid sequence of SEQ ID NO: 417. In another embodiment, the binding protein capable of binding HGF (seq. 1) and ErbB3 (seq. 2) has a reverse orientation and comprises a DVD heavy chain amino acid sequence of SEQ ID NO. 418 and a DVD light chain amino acid sequence of SEQ ID NO: 419.

[0097] In an embodiment, the binding protein capable of binding VEGF (seq. 1) and DLL-4 (seq. 2) comprises a DVD heavy chain amino acid sequence selected from the group consisting of SEQ ID NO. 420 and SEQ ID NO. 422; and a DVD light chain amino acid sequence selected from the group consisting of SEQ ID NO. 421 and SEQ ID NO. 423. In an embodiment, the binding protein capable of binding VEGF (seq. 1) and DLL-4 (seq. 2) comprises a DVD heavy chain amino acid sequence of SEQ ID NO. 420 and a DVD light chain amino acid sequence of SEQ ID NO: 421. In another embodiment, the binding protein capable of binding VEGF (seq. 1) and DLL-4 (seq. 2) has a reverse orientation and comprises a DVD heavy chain amino acid sequence of SEQ ID NO. 422 and a DVD light chain amino acid sequence of SEQ ID NO: 423.

[0098] In a second embodiment, the binding protein capable of binding VEGF (seq. 1) and DLL-4 (seq. 2) comprises a DVD heavy chain amino acid sequence selected from the group consisting of SEQ ID NO. 424 and SEQ ID NO. 426; and a DVD light chain amino acid sequence selected from the group consisting of SEQ ID NO. 425 and SEQ ID NO. 427. In an embodiment, the binding protein capable of binding VEGF (seq. 1) and DLL-4 (seq. 2) comprises a DVD heavy chain amino acid sequence of SEQ ID NO. 424 and a DVD light chain amino acid sequence of SEQ ID NO: 425. In another embodiment, the binding protein capable of binding VEGF (seq. 1) and DLL-4 (seq. 2) has a reverse orientation and comprises a DVD heavy chain amino acid sequence of SEQ ID NO. 426 and a DVD light chain amino acid sequence of SEQ ID NO: 427.

[0099] In a third embodiment, the binding protein capable of binding VEGF (seq. 1) and DLL-4 (seq. 2) comprises a DVD heavy chain amino acid sequence selected from the group consisting of SEQ ID NO. 428 and SEQ ID NO. 430; and a DVD light chain amino acid sequence selected from the group consisting of SEQ ID NO. 429 and SEQ ID NO. 431. In an embodiment, the binding protein capable of binding VEGF (seq. 1) and DLL-4 (seq. 2) comprises a DVD heavy chain amino acid sequence of SEQ ID NO. 428 and a DVD light chain amino acid sequence of SEQ ID NO: 429. In another embodiment, the binding protein capable of binding VEGF (seq. 1) and DLL-4 (seq. 2) has a reverse orientation and comprises a DVD heavy chain amino acid sequence of SEQ ID NO. 430 and a DVD light chain amino acid sequence of SEQ ID NO: 431.

[0100] In a fourth embodiment, the binding protein capable of binding VEGF (seq. 1) and DLL-4 (seq. 2) comprises a DVD heavy chain amino acid sequence selected from the group consisting of SEQ ID NO. 432 and SEQ ID NO. 433; and a DVD light chain amino acid sequence selected from the group consisting of SEQ ID NO. 434 and SEQ ID NO. 435. In an embodiment, the binding protein capable of binding VEGF (seq. 1) and DLL-4 (seq. 2) comprises a DVD heavy chain amino acid sequence of SEQ ID NO. 432 and a DVD light chain amino acid sequence of SEQ ID NO: 433. In another embodiment, the binding protein capable of binding VEGF (seq. 1) and DLL-4 (seq. 2) has a reverse orientation and comprises a DVD heavy chain amino acid sequence of SEQ ID NO. 434 and a DVD light chain amino acid sequence of SEQ ID NO: 435.

[0101] In an embodiment, the binding protein capable of binding VEGF (seq. 2) and DLL-4 (seq. 2) comprises a DVD heavy chain amino acid sequence selected from the group consisting of SEQ ID NO. 436 and SEQ ID NO. 438; and a DVD light chain amino acid sequence selected from the group consisting of SEQ ID NO. 437 and SEQ ID NO. 439. In an embodiment, the binding protein capable of binding VEGF (seq. 2) and DLL-4 (seq. 2) comprises a DVD heavy chain amino acid sequence of SEQ ID NO. 436 and a DVD light chain amino acid sequence of SEQ ID NO: 437. In another embodiment, the binding protein capable of binding VEGF (seq. 2) and DLL-4 (seq. 2) has a reverse orientation and comprises a DVD heavy chain amino acid sequence of SEQ ID NO. 438 and a DVD light chain amino acid sequence of SEQ ID NO: 439.

[0102] In a second embodiment, the binding protein capable of binding VEGF (seq. 2) and DLL-4 (seq. 2) comprises a DVD heavy chain amino acid sequence selected from the group consisting of SEQ ID NO. 440 and SEQ ID NO. 442; and a DVD light chain amino acid sequence selected from the group consisting of SEQ ID NO. 441 and SEQ ID NO. 443. In an embodiment, the binding protein capable of binding VEGF (seq. 2) and DLL-4 (seq. 2) comprises a DVD heavy chain amino acid sequence of SEQ ID NO. 440 and a DVD light chain amino acid sequence of SEQ ID NO: 441. In another embodiment, the binding protein capable of binding VEGF (seq. 2) and DLL-4 (seq. 2) has a reverse orientation and comprises a DVD heavy chain amino acid sequence of SEQ ID NO. 442 and a DVD light chain amino acid sequence of SEQ ID NO: 443.

[0103] In a third embodiment, the binding protein capable of binding VEGF (seq. 2) and DLL-4 (seq. 2) comprises a DVD heavy chain amino acid sequence selected from the group consisting of SEQ ID NO. 444 and SEQ ID NO. 446; and a DVD light chain amino acid sequence selected from the group consisting of SEQ ID NO. 445 and SEQ ID NO. 447. In an embodiment, the binding protein capable of binding VEGF (seq. 2) and DLL-4 (seq. 2) comprises a DVD heavy chain amino acid sequence of SEQ ID NO. 444 and a DVD light chain amino acid sequence of SEQ ID NO: 445. In another embodiment, the binding protein capable of binding VEGF (seq. 2) and DLL-4 (seq. 2) has a reverse orientation and comprises a DVD heavy chain amino acid sequence of SEQ ID NO. 446 and a DVD light chain amino acid sequence of SEQ ID NO: 447.

[0104] In a fourth embodiment, the binding protein capable of binding VEGF (seq. 2) and DLL-4 (seq. 2) comprises a DVD heavy chain amino acid sequence selected from the group consisting of SEQ ID NO. 448 and SEQ ID NO. 450; and a DVD light chain amino acid sequence selected from the group consisting of SEQ ID NO. 449 and SEQ ID NO. 451. In an embodiment, the binding protein capable of binding VEGF (seq. 2) and DLL-4 (seq. 2) comprises a DVD heavy chain amino acid sequence of SEQ ID NO. 448 and a DVD light chain amino acid sequence of SEQ ID NO: 449. In another embodiment, the binding protein capable of binding VEGF (seq. 2) and DLL-4 (seq. 2) has a reverse orientation and comprises a DVD heavy chain amino acid sequence of SEQ ID NO. 450 and a DVD light chain amino acid sequence of SEQ ID NO: 451.

[0105] In an embodiment, the binding protein capable of binding VEGF (seq. 3) and DLL-4 (seq. 2) comprises a DVD heavy chain amino acid sequence selected from the group consisting of SEQ ID NO. 452 and SEQ ID NO. 454; and a DVD light chain amino acid sequence selected from the group consisting of SEQ ID NO. 453 and SEQ ID NO. 455. In an embodiment, the binding protein capable of binding VEGF (seq. 3) and DLL-4 (seq. 2) comprises a DVD heavy chain amino acid sequence of SEQ ID NO. 452 and a DVD light chain amino acid sequence of SEQ ID NO: 453. In another embodiment, the binding protein capable of binding VEGF (seq. 3) and DLL-4 (seq. 2) has a reverse orientation and comprises a DVD heavy chain amino acid sequence of SEQ ID NO. 454 and a DVD light chain amino acid sequence of SEQ ID NO: 455.

[0106] In a second embodiment, the binding protein capable of binding VEGF (seq. 3) and DLL-4 (seq. 2) comprises a DVD heavy chain amino acid sequence selected from the group consisting of SEQ ID NO. 456 and SEQ ID NO. 458; and a DVD light chain amino acid sequence selected from the group consisting of SEQ ID NO. 457 and SEQ ID NO. 459. In an embodiment, the binding protein capable of binding VEGF (seq. 3) and DLL-4 (seq. 2) comprises a DVD heavy chain amino acid sequence of SEQ ID NO. 456 and a DVD light chain amino acid sequence of SEQ ID NO: 457. In another embodiment, the binding protein capable of binding VEGF (seq. 3) and DLL-4 (seq. 2) has a reverse orientation and comprises a DVD heavy chain amino acid sequence of SEQ ID NO. 458 and a DVD light chain amino acid sequence of SEQ ID NO: 459.

[0107] In a third embodiment, the binding protein capable of binding VEGF (seq. 3) and DLL-4 (seq. 2) comprises a DVD heavy chain amino acid sequence selected from the group consisting of SEQ ID NO. 460 and SEQ ID NO. 462; and a DVD light chain amino acid sequence selected from the group consisting of SEQ ID NO. 461 and SEQ ID NO. 463. In an embodiment, the binding protein capable of binding VEGF (seq. 3) and DLL-4 (seq. 2) comprises a DVD heavy chain amino acid sequence of SEQ ID NO. 460 and a DVD light chain amino acid sequence of SEQ ID NO: 461. In another embodiment, the binding protein capable of binding VEGF (seq. 3) and DLL-4 (seq. 2) has a reverse orientation and comprises a DVD heavy chain amino acid sequence of SEQ ID NO. 462 and a DVD light chain amino acid sequence of SEQ ID NO: 463.

[0108] In a fourth embodiment, the binding protein capable of binding VEGF (seq. 3) and DLL-4 (seq. 2) comprises a DVD heavy chain amino acid sequence selected from the group consisting of SEQ ID NO. 464 and SEQ ID NO. 466; and a DVD light chain amino acid sequence selected from the group consisting of SEQ ID NO. 465 and SEQ ID NO. 467. In an embodiment, the binding protein capable of binding VEGF (seq. 3) and DLL-4 (seq. 2) comprises a DVD heavy chain amino acid sequence of SEQ ID NO. 464 and a DVD light chain amino acid sequence of SEQ ID NO: 465. In another embodiment, the binding protein capable of binding VEGF (seq. 3) and DLL-4 (seq. 2) has a reverse orientation and comprises a DVD heavy chain amino acid sequence of SEQ ID NO. 466 and a DVD light chain amino acid sequence of SEQ ID NO: 467.

[0109] In an embodiment, the binding protein capable of binding VEGF (seq. 2) and DLL-4 (seq. 1) comprises a DVD heavy chain amino acid sequence selected from the group consisting of SEQ ID NO. 468 and SEQ ID NO. 470; and a DVD light chain amino acid sequence selected from the group consisting of SEQ ID NO. 469 and SEQ ID NO. 471. In an embodiment, the binding protein capable of binding VEGF (seq. 2) and DLL-4 (seq. 1) comprises a DVD heavy chain amino acid sequence of SEQ ID NO. 468 and a DVD light chain amino acid sequence of SEQ ID NO: 469. In another embodiment, the binding protein capable of binding VEGF (seq. 2) and DLL-4 (seq. 1) has a reverse orientation and comprises a DVD heavy chain amino acid sequence of SEQ ID NO. 470 and a DVD light chain amino acid sequence of SEQ ID NO: 471.

[0110] In a second embodiment, the binding protein capable of binding VEGF (seq. 2) and DLL-4 (seq. 1) comprises a DVD heavy chain amino acid sequence selected from the group consisting of SEQ ID NO. 472 and SEQ ID NO. 474; and a DVD light chain amino acid sequence selected from the group consisting of SEQ ID NO. 473 and SEQ ID NO. 475. In an embodiment, the binding protein capable of binding VEGF (seq. 2) and DLL-4 (seq. 1) comprises a DVD heavy chain amino acid sequence of SEQ ID NO. 472 and a DVD light chain amino acid sequence of SEQ ID NO: 473. In another embodiment, the binding protein capable of binding VEGF (seq. 2) and DLL-4 (seq. 1) has a reverse orientation and comprises a DVD heavy chain amino acid sequence of SEQ ID NO. 474 and a DVD light chain amino acid sequence of SEQ ID NO: 475.

[0111] In a third embodiment, the binding protein capable of binding VEGF (seq. 2) and DLL-4 (seq. 1) comprises a DVD heavy chain amino acid sequence selected from the group consisting of SEQ ID NO. 476 and SEQ ID NO. 478; and a DVD light chain amino acid sequence selected from the group consisting of SEQ ID NO. 477 and SEQ ID NO. 479. In an embodiment, the binding protein capable of binding VEGF (seq. 2) and DLL-4 (seq. 1) comprises a DVD heavy chain amino acid sequence of SEQ ID NO. 476 and a DVD light chain amino acid sequence of SEQ ID NO: 477. In another embodiment, the binding protein capable of binding VEGF (seq. 2) and DLL-4 (seq. 1) has a reverse orientation and comprises a DVD heavy chain amino acid sequence of SEQ ID NO. 478 and a DVD light chain amino acid sequence of SEQ ID NO: 479.

[0112] In a fourth embodiment, the binding protein capable of binding VEGF (seq. 2) and DLL-4 (seq. 1) comprises a DVD heavy chain amino acid sequence selected from the group consisting of SEQ ID NO. 480 and SEQ ID NO. 482; and a DVD light chain amino acid sequence selected from the group consisting of SEQ ID NO. 481 and SEQ ID NO. 483. In an embodiment, the binding protein capable of binding VEGF (seq. 2) and DLL-4 (seq. 1) comprises a DVD heavy chain amino acid sequence of SEQ ID NO. 480 and a DVD light chain amino acid sequence of SEQ ID NO: 481. In another embodiment, the binding protein capable of binding VEGF (seq. 2) and DLL-4 (seq. 1) has a reverse orientation and comprises a DVD heavy chain amino acid sequence of SEQ ID NO. 482 and a DVD light chain amino acid sequence of SEQ ID NO: 483.

[0113] In an embodiment, the binding protein capable of binding VEGF (seq. 3) and DLL-4 (seq. 1) comprises a DVD heavy chain amino acid sequence selected from the group consisting of SEQ ID NO. 484 and SEQ ID NO. 486; and a DVD light chain amino acid sequence selected from the group consisting of SEQ ID NO. 485 and SEQ ID NO. 487. In an embodiment, the binding protein capable of binding VEGF (seq. 3) and DLL-4 (seq. 1) comprises a DVD heavy chain amino acid sequence of SEQ ID NO. 484 and a DVD light chain amino acid sequence of SEQ ID NO: 485. In another embodiment, the binding protein capable of binding VEGF (seq. 3) and DLL-4 (seq. 1) has a reverse orientation and comprises a DVD heavy chain amino acid sequence of SEQ ID NO. 486 and a DVD light chain amino acid sequence of SEQ ID NO: 487.

[0114] In a second embodiment, the binding protein capable of binding VEGF (seq. 3) and DLL-4 (seq. 1) comprises a DVD heavy chain amino acid sequence selected from the group consisting of SEQ ID NO. 488 and SEQ ID NO. 490; and a DVD light chain amino acid sequence selected from the group consisting of SEQ ID NO. 489 and SEQ ID NO. 491. In an embodiment, the binding protein capable of binding VEGF (seq. 3) and DLL-4 (seq. 1) comprises a DVD heavy chain amino acid sequence of SEQ ID NO. 488 and a DVD light chain amino acid sequence of SEQ ID NO: 489. In another embodiment, the binding protein capable of binding VEGF (seq. 3) and DLL-4 (seq. 1) has a reverse orientation and comprises a DVD heavy chain amino acid sequence of SEQ ID NO. 490 and a DVD light chain amino acid sequence of SEQ ID NO: 491.

[0115] In a third embodiment, the binding protein capable of binding VEGF (seq. 3) and DLL-4 (seq. 1) comprises a DVD heavy chain amino acid sequence selected from the group consisting of SEQ ID NO. 492 and SEQ ID NO. 494; and a DVD light chain amino acid sequence selected from the group consisting of SEQ ID NO. 493 and SEQ ID NO. 495. In an embodiment, the binding protein capable of binding VEGF (seq. 3) and DLL-4 (seq. 1) comprises a DVD heavy chain amino acid sequence of SEQ ID NO. 492 and a DVD light chain amino acid sequence of SEQ ID NO: 493. In another embodiment, the binding protein capable of binding VEGF (seq. 3) and DLL-4 (seq. 1) has a reverse orientation and comprises a DVD heavy chain amino acid sequence of SEQ ID NO. 494 and a DVD light chain amino acid sequence of SEQ ID NO: 495.

[0116] In a fourth embodiment, the binding protein capable of binding VEGF (seq. 3) and DLL-4 (seq. 1) comprises a DVD heavy chain amino acid sequence selected from the group consisting of SEQ ID NO. 496 and SEQ ID NO. 498; and a DVD light chain amino acid sequence selected from the group consisting of SEQ ID NO. 497 and SEQ ID NO. 499. In an embodiment, the binding protein capable of binding VEGF (seq. 3) and DLL-4 (seq. 1) comprises a DVD heavy chain amino acid sequence of SEQ ID NO. 496 and a DVD light chain amino acid sequence of SEQ ID NO: 497. In another embodiment, the binding protein capable of binding VEGF (seq. 3) and DLL-4 (seq. 1) has a reverse orientation and comprises a DVD heavy chain amino acid sequence of SEQ ID NO. 498 and a DVD light chain amino acid sequence of SEQ ID NO: 499.

[0117] In an embodiment, the binding protein capable of binding VEGF (seq. 1) and DLL-4 (seq. 1) comprises a DVD heavy chain amino acid sequence selected from the group consisting of SEQ ID NO. 500 and SEQ ID NO. 502; and a DVD light chain amino acid sequence selected from the group consisting of SEQ ID NO. 501 and SEQ ID NO. 503. In an embodiment, the binding protein capable of binding VEGF (seq. 1) and DLL-4 (seq. 1) comprises a DVD heavy chain amino acid sequence of SEQ ID NO. 500 and a DVD light chain amino acid sequence of SEQ ID NO: 501. In another embodiment, the binding protein capable of binding VEGF (seq. 1) and DLL-4 (seq. 1) has a reverse orientation and comprises a DVD heavy chain amino acid sequence of SEQ ID NO. 502 and a DVD light chain amino acid sequence of SEQ ID NO: 503.

[0118] In a second embodiment, the binding protein capable of binding VEGF (seq. 1) and DLL-4 (seq. 1) comprises a DVD heavy chain amino acid sequence selected from the group consisting of SEQ ID NO. 504 and SEQ ID NO. 506; and a DVD light chain amino acid sequence selected from the group consisting of SEQ ID NO. 505 and SEQ ID NO. 507. In an embodiment, the binding protein capable of binding VEGF (seq. 1) and DLL-4 (seq. 1) comprises a DVD heavy chain amino acid sequence of SEQ ID NO. 504 and a DVD light chain amino acid sequence of SEQ ID NO: 505. In another embodiment, the binding protein capable of binding VEGF (seq. 1) and DLL-4 (seq. 1) has a reverse orientation and comprises a DVD heavy chain amino acid sequence of SEQ ID NO. 506 and a DVD light chain amino acid sequence of SEQ ID NO: 507.

[0119] In a third embodiment, the binding protein capable of binding VEGF (seq. 1) and DLL-4 (seq. 1) comprises a DVD heavy chain amino acid sequence selected from the group consisting of SEQ ID NO. 508 and SEQ ID NO. 510; and a DVD light chain amino acid sequence selected from the group consisting of SEQ ID NO. 509 and SEQ ID NO. 511. In an embodiment, the binding protein capable of binding VEGF (seq. 1) and DLL-4 (seq. 1) comprises a DVD heavy chain amino acid sequence of SEQ ID NO. 508 and a DVD light chain amino acid sequence of SEQ ID NO: 509. In another embodiment, the binding protein capable of binding VEGF (seq. 1) and DLL-4 (seq. 1) has a reverse orientation and comprises a DVD heavy chain amino acid sequence of SEQ ID NO. 510 and a DVD light chain amino acid sequence of SEQ ID NO: 511.

[0120] In an embodiment, the binding protein capable of binding VEGF (seq. 1) and DLL-4 (seq. 3) comprises a DVD heavy chain amino acid sequence selected from the group consisting of SEQ ID NO. 512 and SEQ ID NO. 514; and a DVD light chain amino acid sequence selected from the group consisting of SEQ ID NO. 513 and SEQ ID NO. 515. In an embodiment, the binding protein capable of binding VEGF (seq. 1) and DLL-4 (seq. 3) comprises a DVD heavy chain amino acid sequence of SEQ ID NO. 512 and a DVD light chain amino acid sequence of SEQ ID NO: 513. In another embodiment, the binding protein capable of binding VEGF (seq. 1) and DLL-4 (seq. 3) has a reverse orientation and comprises a DVD heavy chain amino acid sequence of SEQ ID NO. 514 and a DVD light chain amino acid sequence of SEQ ID NO: 515.

[0121] In a second embodiment, the binding protein capable of binding VEGF (seq. 1) and DLL-4 (seq. 3) comprises a DVD heavy chain amino acid sequence selected from the group consisting of SEQ ID NO. 516 and SEQ ID NO. 518; and a DVD light chain amino acid sequence selected from the group consisting of SEQ ID NO. 517 and SEQ ID NO. 519. In an embodiment, the binding protein capable of binding VEGF (seq. 1) and DLL-4 (seq. 3) comprises a DVD heavy chain amino acid sequence of SEQ ID NO. 516 and a DVD light chain amino acid sequence of SEQ ID NO: 517. In another embodiment, the binding protein capable of binding VEGF (seq. 1) and DLL-4 (seq. 3) has a reverse orientation and comprises a DVD heavy chain amino acid sequence of SEQ ID NO. 518 and a DVD light chain amino acid sequence of SEQ ID NO: 519.

[0122] In a third embodiment, the binding protein capable of binding VEGF (seq. 1) and DLL-4 (seq. 3) comprises a DVD heavy chain amino acid sequence selected from the group consisting of SEQ ID NO. 520 and SEQ ID NO. 522; and a DVD light chain amino acid sequence selected from the group consisting of SEQ ID NO. 521 and SEQ ID NO. 523. In an embodiment, the binding protein capable of binding VEGF (seq. 1) and DLL-4 (seq. 3) comprises a DVD heavy chain amino acid sequence of SEQ ID NO. 520 and a DVD light chain amino acid sequence of SEQ ID NO: 521. In another embodiment, the binding protein capable of binding VEGF (seq. 1) and DLL-4 (seq. 3) has a reverse orientation and comprises a DVD heavy chain amino acid sequence of SEQ ID NO. 522 and a DVD light chain amino acid sequence of SEQ ID NO: 523.

[0123] In a fourth embodiment, the binding protein capable of binding VEGF (seq. 1) and DLL-4 (seq. 3) comprises a DVD heavy chain amino acid sequence selected from the group consisting of SEQ ID NO. 524 and SEQ ID NO. 526; and a DVD light chain amino acid sequence selected from the group consisting of SEQ ID NO. 525 and SEQ ID NO. 527. In an embodiment, the binding protein capable of binding VEGF (seq. 1) and DLL-4 (seq. 3) comprises a DVD heavy chain amino acid sequence of SEQ ID NO. 524 and a DVD light chain amino acid sequence of SEQ ID NO: 525. In another embodiment, the binding protein capable of binding VEGF (seq. 1) and DLL-4 (seq. 3) has a reverse orientation and comprises a DVD heavy chain amino acid sequence of SEQ ID NO. 526 and a DVD light chain amino acid sequence of SEQ ID NO: 527.

[0124] In an embodiment, the binding protein capable of binding VEGF (seq. 2) and DLL-4 (seq. 3) comprises a DVD heavy chain amino acid sequence selected from the group consisting of SEQ ID NO. 528 and SEQ ID NO. 530; and a DVD light chain amino acid sequence selected from the group consisting of SEQ ID NO. 529 and SEQ ID NO. 531. In an embodiment, the binding protein capable of binding VEGF (seq. 2) and DLL-4 (seq. 3) comprises a DVD heavy chain amino acid sequence of SEQ ID NO. 528 and a DVD light chain amino acid sequence of SEQ ID NO: 529. In another embodiment, the binding protein capable of binding VEGF (seq. 2) and DLL-4 (seq. 3) has a reverse orientation and comprises a DVD heavy chain amino acid sequence of SEQ ID NO. 530 and a DVD light chain amino acid sequence of SEQ ID NO: 531.

[0125] In a second embodiment, the binding protein capable of binding VEGF (seq. 2) and DLL-4 (seq. 3) comprises a DVD heavy chain amino acid sequence selected from the group consisting of SEQ ID NO. 532 and SEQ ID NO. 534; and a DVD light chain amino acid sequence selected from the group consisting of SEQ ID NO. 533 and SEQ ID NO. 535. In an embodiment, the binding protein capable of binding VEGF (seq. 2) and DLL-4 (seq. 3) comprises a DVD heavy chain amino acid sequence of SEQ ID NO. 532 and a DVD light chain amino acid sequence of SEQ ID NO: 533. In another embodiment, the binding protein capable of binding VEGF (seq. 2) and DLL-4 (seq. 3) has a reverse orientation and comprises a DVD heavy chain amino acid sequence of SEQ ID NO. 534 and a DVD light chain amino acid sequence of SEQ ID NO: 535.

[0126] In a third embodiment, the binding protein capable of binding VEGF (seq. 2) and DLL-4 (seq. 3) comprises a DVD heavy chain amino acid sequence selected from the group consisting of SEQ ID NO. 536 and SEQ ID NO. 538; and a DVD light chain amino acid sequence selected from the group consisting of SEQ ID NO. 537 and SEQ ID NO. 539. In an embodiment, the binding protein capable of binding VEGF (seq. 2) and DLL-4 (seq. 3) comprises a DVD heavy chain amino acid sequence of SEQ ID NO. 536 and a DVD light chain amino acid sequence of SEQ ID NO: 537. In another embodiment, the binding protein capable of binding VEGF (seq. 2) and DLL-4 (seq. 3) has a reverse orientation and comprises a DVD heavy chain amino acid sequence of SEQ ID NO. 538 and a DVD light chain amino acid sequence of SEQ ID NO: 539.

[0127] In a fourth embodiment, the binding protein capable of binding VEGF (seq. 2) and DLL-4 (seq. 3) comprises a DVD heavy chain amino acid sequence selected from the group consisting of SEQ ID NO. 540 and SEQ ID NO. 542; and a DVD light chain amino acid sequence selected from the group consisting of SEQ ID NO. 541 and SEQ ID NO. 543. In an embodiment, the binding protein capable of binding VEGF (seq. 2) and DLL-4 (seq. 3) comprises a DVD heavy chain amino acid sequence of SEQ ID NO. 540 and a DVD light chain amino acid sequence of SEQ ID NO: 541. In another embodiment, the binding protein capable of binding VEGF (seq. 2) and DLL-4 (seq. 3) has a reverse orientation and comprises a DVD heavy chain amino acid sequence of SEQ ID NO. 542 and a DVD light chain amino acid sequence of SEQ ID NO: 543.

[0128] In an embodiment, the binding protein capable of binding VEGF (seq. 3) and DLL-4 (seq. 3) comprises a DVD heavy chain amino acid sequence selected from the group consisting of SEQ ID NO. 544 and SEQ ID NO. 546; and a DVD light chain amino acid sequence selected from the group consisting of SEQ ID NO. 545 and SEQ ID NO. 547. In an embodiment, the binding protein capable of binding VEGF (seq. 3) and DLL-4 (seq. 3) comprises a DVD heavy chain amino acid sequence of SEQ ID NO. 544 and a DVD light chain amino acid sequence of SEQ ID NO: 545. In another embodiment, the binding protein capable of binding VEGF (seq. 3) and DLL-4 (seq. 3) has a reverse orientation and comprises a DVD heavy chain amino acid sequence of SEQ ID NO. 546 and a DVD light chain amino acid sequence of SEQ ID NO: 547.

[0129] In a second embodiment, the binding protein capable of binding VEGF (seq. 3) and DLL-4 (seq. 3) comprises a DVD heavy chain amino acid sequence selected from the group consisting of SEQ ID NO. 548 and SEQ ID NO. 550; and a DVD light chain amino acid sequence selected from the group consisting of SEQ ID NO. 549 and SEQ ID NO. 551. In an embodiment, the binding protein capable of binding VEGF (seq. 3) and DLL-4 (seq. 3) comprises a DVD heavy chain amino acid sequence of SEQ ID NO. 548 and a DVD light chain amino acid sequence of SEQ ID NO: 549. In another embodiment, the binding protein capable of binding VEGF (seq. 3) and DLL-4 (seq. 3) has a reverse orientation and comprises a DVD heavy chain amino acid sequence of SEQ ID NO. 550 and a DVD light chain amino acid sequence of SEQ ID NO: 551.

[0130] In a third embodiment, the binding protein capable of binding VEGF (seq. 3) and DLL-4 (seq. 3) comprises a DVD heavy chain amino acid sequence selected from the group consisting of SEQ ID NO. 552 and SEQ ID NO. 554; and a DVD light chain amino acid sequence selected from the group consisting of SEQ ID NO. 553 and SEQ ID NO. 555. In an embodiment, the binding protein capable of binding VEGF (seq. 3) and DLL-4 (seq. 3) comprises a DVD heavy chain amino acid sequence of SEQ ID NO. 552 and a DVD light chain amino acid sequence of SEQ ID NO: 553. In another embodiment, the binding protein capable of binding VEGF (seq. 3) and DLL-4 (seq. 3) has a reverse orientation and comprises a DVD heavy chain amino acid sequence of SEQ ID NO. 554 and a DVD light chain amino acid sequence of SEQ ID NO: 555.

[0131] In a fourth embodiment, the binding protein capable of binding VEGF (seq. 3) and DLL-4 (seq. 3) comprises a DVD heavy chain amino acid sequence selected from the group consisting of SEQ ID NO. 556 and SEQ ID NO. 558; and a DVD light chain amino acid sequence selected from the group consisting of SEQ ID NO. 557 and SEQ ID NO. 559. In an embodiment, the binding protein capable of binding VEGF (seq. 3) and DLL-4 (seq. 3) comprises a DVD heavy chain amino acid sequence of SEQ ID NO. 556 and a DVD light chain amino acid sequence of SEQ ID NO: 557. In another embodiment, the binding protein capable of binding VEGF (seq. 3) and DLL-4 (seq. 3) has a reverse orientation and comprises a DVD heavy chain amino acid sequence of SEQ ID NO. 558 and a DVD light chain amino acid sequence of SEQ ID NO: 559.

[0132] In an embodiment, the binding protein capable of binding VEGF (seq. 1) and DLL-4 (seq. 4) comprises a DVD heavy chain amino acid sequence selected from the group consisting of SEQ ID NO. 560 and SEQ ID NO. 562; and a DVD light chain amino acid sequence selected from the group consisting of SEQ ID NO. 561 and SEQ ID NO. 563. In an embodiment, the binding protein capable of binding VEGF (seq. 1) and DLL-4 (seq. 4) comprises a DVD heavy chain amino acid sequence of SEQ ID NO. 560 and a DVD light chain amino acid sequence of SEQ ID NO: 561. In another embodiment, the binding protein capable of binding VEGF (seq. 1) and DLL-4 (seq. 4) has a reverse orientation and comprises a DVD heavy chain amino acid sequence of SEQ ID NO. 562 and a DVD light chain amino acid sequence of SEQ ID NO: 563.

[0133] In a second embodiment, the binding protein capable of binding VEGF (seq. 1) and DLL-4 (seq. 4) comprises a DVD heavy chain amino acid sequence selected from the group consisting of SEQ ID NO. 564 and SEQ ID NO. 566; and a DVD light chain amino acid sequence selected from the group consisting of SEQ ID NO. 565 and SEQ ID NO. 567. In an embodiment, the binding protein capable of binding VEGF (seq. 1) and DLL-4 (seq. 4) comprises a DVD heavy chain amino acid sequence of SEQ ID NO. 564 and a DVD light chain amino acid sequence of SEQ ID NO: 565. In another embodiment, the binding protein capable of binding VEGF (seq. 1) and DLL-4 (seq. 4) has a reverse orientation and comprises a DVD heavy chain amino acid sequence of SEQ ID NO. 566 and a DVD light chain amino acid sequence of SEQ ID NO: 567.

[0134] In a third embodiment, the binding protein capable of binding VEGF (seq. 1) and DLL-4 (seq. 4) comprises a DVD heavy chain amino acid sequence selected from the group consisting of SEQ ID NO. 568 and SEQ ID NO. 570; and a DVD light chain amino acid sequence selected from the group consisting of SEQ ID NO. 569 and SEQ ID NO. 571. In an embodiment, the binding protein capable of binding VEGF (seq. 1) and DLL-4 (seq. 4) comprises a DVD heavy chain amino acid sequence of SEQ ID NO. 568 and a DVD light chain amino acid sequence of SEQ ID NO: 569. In another embodiment, the binding protein capable of binding VEGF (seq. 1) and DLL-4 (seq. 4) has a reverse orientation and comprises a DVD heavy chain amino acid sequence of SEQ ID NO. 570 and a DVD light chain amino acid sequence of SEQ ID NO: 571.

[0135] In a fourth embodiment, the binding protein capable of binding VEGF (seq. 1) and DLL-4 (seq. 4) comprises a DVD heavy chain amino acid sequence selected from the group consisting of SEQ ID NO. 572 and SEQ ID NO. 574; and a DVD light chain amino acid sequence selected from the group consisting of SEQ ID NO. 573 and SEQ ID NO. 575. In an embodiment, the binding protein capable of binding VEGF (seq. 1) and DLL-4 (seq. 4) comprises a DVD heavy chain amino acid sequence of SEQ ID NO. 572 and a DVD light chain amino acid sequence of SEQ ID NO: 573. In another embodiment, the binding protein capable of binding VEGF (seq. 1) and DLL-4 (seq. 4) has a reverse orientation and comprises a DVD heavy chain amino acid sequence of SEQ ID NO. 574 and a DVD light chain amino acid sequence of SEQ ID NO: 575.

[0136] In an embodiment, the binding protein capable of binding VEGF (seq. 2) and DLL-4 (seq. 4) comprises a DVD heavy chain amino acid sequence selected from the group consisting of SEQ ID NO. 576 and SEQ ID NO. 578; and a DVD light chain amino acid sequence selected from the group consisting of SEQ ID NO. 577 and SEQ ID NO. 579. In an embodiment, the binding protein capable of binding VEGF (seq. 2) and DLL-4 (seq. 4) comprises a DVD heavy chain amino acid sequence of SEQ ID NO. 576 and a DVD light chain amino acid sequence of SEQ ID NO: 577. In another embodiment, the binding protein capable of binding VEGF (seq. 2) and DLL-4 (seq. 4) has a reverse orientation and comprises a DVD heavy chain amino acid sequence of SEQ ID NO. 578 and a DVD light chain amino acid sequence of SEQ ID NO: 579.

[0137] In a second embodiment, the binding protein capable of binding VEGF (seq. 2) and DLL-4 (seq. 4) comprises a DVD heavy chain amino acid sequence selected from the group consisting of SEQ ID NO. 580 and SEQ ID NO. 582; and a DVD light chain amino acid sequence selected from the group consisting of SEQ ID NO. 581 and SEQ ID NO. 583. In an embodiment, the binding protein capable of binding VEGF (seq. 2) and DLL-4 (seq. 4) comprises a DVD heavy chain amino acid sequence of SEQ ID NO. 580 and a DVD light chain amino acid sequence of SEQ ID NO: 581. In another embodiment, the binding protein capable of binding VEGF (seq. 2) and DLL-4 (seq. 4) has a reverse orientation and comprises a DVD heavy chain amino acid sequence of SEQ ID NO. 582 and a DVD light chain amino acid sequence of SEQ ID NO: 583.

[0138] In a third embodiment, the binding protein capable of binding VEGF (seq. 2) and DLL-4 (seq. 4) comprises a DVD heavy chain amino acid sequence selected from the group consisting of SEQ ID NO. 584 and SEQ ID NO. 586; and a DVD light chain amino acid sequence selected from the group consisting of SEQ ID NO. 585 and SEQ ID NO. 587. In an embodiment, the binding protein capable of binding VEGF (seq. 2) and DLL-4 (seq. 4) comprises a DVD heavy chain amino acid sequence of SEQ ID NO. 584 and a DVD light chain amino acid sequence of SEQ ID NO: 585. In another embodiment, the binding protein capable of binding VEGF (seq. 2) and DLL-4 (seq. 4.) has a reverse orientation and comprises a DVD heavy chain amino acid sequence of SEQ ID NO. 586 and a DVD light chain amino acid sequence of SEQ ID NO: 587.

[0139] In a fourth embodiment, the binding protein capable of binding VEGF (seq. 2) and DLL-4 (seq. 4) comprises a DVD heavy chain amino acid sequence selected from the group consisting of SEQ ID NO. 588 and SEQ ID NO. 590; and a DVD light chain amino acid sequence selected from the group consisting of SEQ ID NO. 589 and SEQ ID NO. 591. In an embodiment, the binding protein capable of binding VEGF (seq. 2) and DLL-4 (seq. 4) comprises a DVD heavy chain amino acid sequence of SEQ ID NO. 588 and a DVD light chain amino acid sequence of SEQ ID NO: 589. In another embodiment, the binding protein capable of binding VEGF (seq. 2) and DLL-4 (seq. 4) has a reverse orientation and comprises a DVD heavy chain amino acid sequence of SEQ ID NO. 590 and a DVD light chain amino acid sequence of SEQ ID NO: 591.

[0140] In an embodiment, the binding protein capable of binding VEGF (seq. 3) and DLL-4 (seq. 4) comprises a DVD heavy chain amino acid sequence selected from the group consisting of SEQ ID NO. 592 and SEQ ID NO. 594; and a DVD light chain amino acid sequence selected from the group consisting of SEQ ID NO. 593 and SEQ ID NO. 595. In an embodiment, the binding protein capable of binding VEGF (seq. 3) and DLL-4 (seq. 4) comprises a DVD heavy chain amino acid sequence of SEQ ID NO. 592 and a DVD light chain amino acid sequence of SEQ ID NO: 593. In another embodiment, the binding protein capable of binding VEGF (seq. 3) and DLL-4 (seq. 4) has a reverse orientation and comprises a DVD heavy chain amino acid sequence of SEQ ID NO. 594 and a DVD light chain amino acid sequence of SEQ ID NO: 595.

[0141] In a second embodiment, the binding protein capable of binding VEGF (seq. 3) and DLL-4 (seq. 4) comprises a DVD heavy chain amino acid sequence selected from the group consisting of SEQ ID NO. 596 and SEQ ID NO. 598; and a DVD light chain amino acid sequence selected from the group consisting of SEQ ID NO. 597 and SEQ ID NO. 599. In an embodiment, the binding protein capable of binding VEGF (seq. 3) and DLL-4 (seq. 4) comprises a DVD heavy chain amino acid sequence of SEQ ID NO. 596 and a DVD light chain amino acid sequence of SEQ ID NO: 597. In another embodiment, the binding protein capable of binding VEGF (seq. 3) and DLL-4 (seq. 4) has a reverse orientation and comprises a DVD heavy chain amino acid sequence of SEQ ID NO. 598 and a DVD light chain amino acid sequence of SEQ ID NO: 599.

[0142] In a third embodiment, the binding protein capable of binding VEGF (seq. 3) and DLL-4 (seq. 4) comprises a DVD heavy chain amino acid sequence selected from the group consisting of SEQ ID NO. 600 and SEQ ID NO. 602; and a DVD light chain amino acid sequence selected from the group consisting of SEQ ID NO. 601 and SEQ ID NO. 603. In an embodiment, the binding protein capable of binding VEGF (seq. 3) and DLL-4 (seq. 4) comprises a DVD heavy chain amino acid sequence of SEQ ID NO. 600 and a DVD light chain amino acid sequence of SEQ ID NO: 601. In another embodiment, the binding protein capable of binding VEGF (seq. 3) and DLL-4 (seq. 4) has a reverse orientation and comprises a DVD heavy chain amino acid sequence of SEQ ID NO. 602 and a DVD light chain amino acid sequence of SEQ ID NO: 603.

[0143] In a fourth embodiment, the binding protein capable of binding VEGF (seq. 3) and DLL-4 (seq. 4) comprises a DVD heavy chain amino acid sequence selected from the group consisting of SEQ ID NO. 604 and SEQ ID NO. 606; and a DVD light chain amino acid sequence selected from the group consisting of SEQ ID NO. 605 and SEQ ID NO. 607. In an embodiment, the binding protein capable of binding VEGF (seq. 3) and DLL-4 (seq. 4) comprises a DVD heavy chain amino acid sequence of SEQ ID NO. 604 and a DVD light chain amino acid sequence of SEQ ID NO: 605. In another embodiment, the binding protein capable of binding VEGF (seq. 3) and DLL-4 (seq. 4) has a reverse orientation and comprises a DVD heavy chain amino acid sequence of SEQ ID NO. 606 and a DVD light chain amino acid sequence of SEQ ID NO: 607.

[0144] In an embodiment, the binding protein capable of binding HER-2 (seq. 1) and ErbB3 (seq. 1) comprises a DVD heavy chain amino acid sequence selected from the group consisting of SEQ ID NO. 608 and SEQ ID NO. 610; and a DVD light chain amino acid sequence selected from the group consisting of SEQ ID NO. 609 and SEQ ID NO. 611. In an embodiment, the binding protein capable of binding HER-2 (seq. 1) and ErbB3 (seq. 1) comprises a DVD heavy chain amino acid sequence of SEQ ID NO. 608 and a DVD light chain amino acid sequence of SEQ ID NO: 609. In another embodiment, the binding protein capable of binding HER-2 (seq. 1) and ErbB3 (seq. 1) has a reverse orientation and comprises a DVD heavy chain amino acid sequence of SEQ ID NO. 610 and a DVD light chain amino acid sequence of SEQ ID NO: 611.

[0145] In a second embodiment, the binding protein capable of binding HER-2 (seq. 1) and ErbB3 (seq. 1) comprises a DVD heavy chain amino acid sequence selected from the group consisting of SEQ ID NO. 612 and SEQ ID NO. 614; and a DVD light chain amino acid sequence selected from the group consisting of SEQ ID NO. 613 and SEQ ID NO. 615. In an embodiment, the binding protein capable of binding HER-2 (seq. 1) and ErbB3 (seq. 1) comprises a DVD heavy chain amino acid sequence of SEQ ID NO. 612 and a DVD light chain amino acid sequence of SEQ ID NO: 613. In another embodiment, the binding protein capable of binding HER-2 (seq. 1) and ErbB3 (seq. 1) has a reverse orientation and comprises a DVD heavy chain amino acid sequence of SEQ ID NO. 614 and a DVD light chain amino acid sequence of SEQ ID NO: 615.

[0146] In a third embodiment, the binding protein capable of binding HER-2 (seq. 1) and ErbB3 (seq. 1) comprises a DVD heavy chain amino acid sequence selected from the group consisting of SEQ ID NO. 616 and SEQ ID NO. 618; and a DVD light chain amino acid sequence selected from the group consisting of SEQ ID NO. 617 and SEQ ID NO. 619. In an embodiment, the binding protein capable of binding HER-2 (seq. 1) and ErbB3 (seq. 1) comprises a DVD heavy chain amino acid sequence of SEQ ID NO. 616 and a DVD light chain amino acid sequence of SEQ ID NO: 617. In another embodiment, the binding protein capable of binding HER-2 (seq. 1) and ErbB3 (seq. 1) has a reverse orientation and comprises a DVD heavy chain amino acid sequence of SEQ ID NO. 618 and a DVD light chain amino acid sequence of SEQ ID NO: 619.

[0147] In a fourth embodiment, the binding protein capable of binding HER-2 (seq. 1) and ErbB3 (seq. 1) comprises a DVD heavy chain amino acid sequence selected from the group consisting of SEQ ID NO. 620 and SEQ ID NO. 622; and a DVD light chain amino acid sequence selected from the group consisting of SEQ ID NO. 621 and SEQ ID NO. 623. In an embodiment, the binding protein capable of binding HER-2 (seq. 1) and ErbB3 (seq. 1) comprises a DVD heavy chain amino acid sequence of SEQ ID NO. 620 and a DVD light chain amino acid sequence of SEQ ID NO: 621. In another embodiment, the binding protein capable of binding HER-2 (seq. 1) and ErbB3 (seq. 1) has a reverse orientation and comprises a DVD heavy chain amino acid sequence of SEQ ID NO. 622 and a DVD light chain amino acid sequence of SEQ ID NO: 623.

[0148] In an embodiment, the binding protein capable of binding HER-2 (seq. 1) and ErbB3 (seq. 2) comprises a DVD heavy chain amino acid sequence selected from the group consisting of SEQ ID NO. 624 and SEQ ID NO. 626; and a DVD light chain amino acid sequence selected from the group consisting of SEQ ID NO. 625 and SEQ ID NO. 627. In an embodiment, the binding protein capable of binding HER-2 (seq. 1) and ErbB3 (seq. 2) comprises a DVD heavy chain amino acid sequence of SEQ ID NO. 624 and a DVD light chain amino acid sequence of SEQ ID NO: 625. In another embodiment, the binding protein capable of binding HER-2 (seq. 1) and ErbB3 (seq. 2) has a reverse orientation and comprises a DVD heavy chain amino acid sequence of SEQ ID NO. 626 and a DVD light chain amino acid sequence of SEQ ID NO: 627.

[0149] In a second embodiment, the binding protein capable of binding HER-2 (seq. 1) and ErbB3 (seq. 2) comprises a DVD heavy chain amino acid sequence selected from the group consisting of SEQ ID NO. 628 and SEQ ID NO. 630; and a DVD light chain amino acid sequence selected from the group consisting of SEQ ID NO. 629 and SEQ ID NO. 631. In an embodiment, the binding protein capable of binding HER-2 (seq. 1) and ErbB3 (seq. 2) comprises a DVD heavy chain amino acid sequence of SEQ ID NO. 628 and a DVD light chain amino acid sequence of SEQ ID NO: 629. In another embodiment, the binding protein capable of binding HER-2 (seq. 1) and ErbB3 (seq. 2) has a reverse orientation and comprises a DVD heavy chain amino acid sequence of SEQ ID NO. 630 and a DVD light chain amino acid sequence of SEQ ID NO: 631.

[0150] In a third embodiment, the binding protein capable of binding HER-2 (seq. 1) and ErbB3 (seq. 2) comprises a DVD heavy chain amino acid sequence selected from the group consisting of SEQ ID NO. 632 and SEQ ID NO. 634; and a DVD light chain amino acid sequence selected from the group consisting of SEQ ID NO. 633 and SEQ ID NO. 635. In an embodiment, the binding protein capable of binding HER-2 (seq. 1) and ErbB3 (seq. 2) comprises a DVD heavy chain amino acid sequence of SEQ ID NO. 632 and a DVD light chain amino acid sequence of SEQ ID NO: 633. In another embodiment, the binding protein capable of binding HER-2 (seq. 1) and ErbB3 (seq. 2) has a reverse orientation and comprises a DVD heavy chain amino acid sequence of SEQ ID NO. 634 and a DVD light chain amino acid sequence of SEQ ID NO: 635.

[0151] In a fourth embodiment, the binding protein capable of binding HER-2 (seq. 1) and ErbB3 (seq. 2) comprises a DVD heavy chain amino acid sequence selected from the group consisting of SEQ ID NO. 636 and SEQ ID NO. 638; and a DVD light chain amino acid sequence selected from the group consisting of SEQ ID NO. 637 and SEQ ID NO. 639. In an embodiment, the binding protein capable of binding HER-2 (seq. 1) and ErbB3 (seq. 2) comprises a DVD heavy chain amino acid sequence of SEQ ID NO. 636 and a DVD light chain amino acid sequence of SEQ ID NO: 637. In another embodiment, the binding protein capable of binding HER-2 (seq. 1) and ErbB3 (seq. 2) has a reverse orientation and comprises a DVD heavy chain amino acid sequence of SEQ ID NO. 638 and a DVD light chain amino acid sequence of SEQ ID NO: 639.

[0152] In an embodiment, the binding protein capable of binding EGFR (seq. 2) and ErbB3 (seq. 3) comprises a DVD heavy chain amino acid sequence selected from the group consisting of SEQ ID NO. 640 and SEQ ID NO. 642; and a DVD light chain amino acid sequence selected from the group consisting of SEQ ID NO. 641 and SEQ ID NO. 642. In an embodiment, the binding protein capable of binding EGFR (seq. 2) and ErbB3 (seq. 3) comprises a DVD heavy chain amino acid sequence of SEQ ID NO. 640 and a DVD light chain amino acid sequence of SEQ ID NO: 641. In another embodiment, the binding protein capable of binding EGFR (seq. 2) and ErbB3 (seq. 3) has a reverse orientation and comprises a DVD heavy chain amino acid sequence of SEQ ID NO. 642 and a DVD light chain amino acid sequence of SEQ ID NO: 643.

[0153] In a second embodiment, the binding protein capable of binding EGFR (seq. 2) and ErbB3 (seq. 3) comprises a DVD heavy chain amino acid sequence selected from the group consisting of SEQ ID NO. 644 and SEQ ID NO. 646; and a DVD light chain amino acid sequence selected from the group consisting of SEQ ID NO. 645 and SEQ ID NO. 647. In an embodiment, the binding protein capable of binding EGFR (seq. 2) and ErbB3 (seq. 3) comprises a DVD heavy chain amino acid sequence of SEQ ID NO. 644 and a DVD light chain amino acid sequence of SEQ ID NO: 645. In another embodiment, the binding protein capable of binding EGFR (seq. 2) and ErbB3 (seq. 3) has a reverse orientation and comprises a DVD heavy chain amino acid sequence of SEQ ID NO. 646 and a DVD light chain amino acid sequence of SEQ ID NO: 647.

[0154] In a third embodiment, the binding protein capable of binding EGFR (seq. 2) and ErbB3 (seq. 3) comprises a DVD heavy chain amino acid sequence selected from the group consisting of SEQ ID NO. 648 and SEQ ID NO. 650; and a DVD light chain amino acid sequence selected from the group consisting of SEQ ID NO. 649 and SEQ ID NO. 651. In an embodiment, the binding protein capable of binding EGFR (seq. 2) and ErbB3 (seq. 3) comprises a DVD heavy chain amino acid sequence of SEQ ID NO. 648 and a DVD light chain amino acid sequence of SEQ ID NO: 649. In another embodiment, the binding protein capable of binding EGFR (seq. 2) and ErbB3 (seq. 3) has a reverse orientation and comprises a DVD heavy chain amino acid sequence of SEQ ID NO. 650 and a DVD light chain amino acid sequence of SEQ ID NO: 651.

[0155] In a fourth embodiment, the binding protein capable of binding EGFR (seq. 2) and ErbB3 (seq. 3) comprises a DVD heavy chain amino acid sequence selected from the group consisting of SEQ ID NO. 652 and SEQ ID NO. 654; and a DVD light chain amino acid sequence selected from the group consisting of SEQ ID NO. 653 and SEQ ID NO. 655. In an embodiment, the binding protein capable of binding EGFR (seq. 2) and ErbB3 (seq. 3) comprises a DVD heavy chain amino acid sequence of SEQ ID NO. 652 and a DVD light chain amino acid sequence of SEQ ID NO: 653. In another embodiment, the binding protein capable of binding EGFR (seq. 2) and ErbB3 (seq. 3) has a reverse orientation and comprises a DVD heavy chain amino acid sequence of SEQ ID NO. 654 and a DVD light chain amino acid sequence of SEQ ID NO: 655.

[0156] In an embodiment, the binding protein capable of binding HER-2 (seq. 1) and ErbB3 (seq. 3) comprises a DVD heavy chain amino acid sequence selected from the group consisting of SEQ ID NO. 656 and SEQ ID NO. 658; and a DVD light chain amino acid sequence selected from the group consisting of SEQ ID NO. 657 and SEQ ID NO. 659. In an embodiment, the binding protein capable of binding HER-2 (seq. 1) and ErbB3 (seq. 3) comprises a DVD heavy chain amino acid sequence of SEQ ID NO. 656 and a DVD light chain amino acid sequence of SEQ ID NO: 657. In another embodiment, the binding protein capable of binding HER-2 (seq. 1) and ErbB3 (seq. 3) has a reverse orientation and comprises a DVD heavy chain amino acid sequence of SEQ ID NO. 658 and a DVD light chain amino acid sequence of SEQ ID NO: 659.

[0157] In a second embodiment, the binding protein capable of binding HER-2 (seq. 1) and ErbB3 (seq. 3) comprises a DVD heavy chain amino acid sequence selected from the group consisting of SEQ ID NO. 660 and SEQ ID NO. 662; and a DVD light chain amino acid sequence selected from the group consisting of SEQ ID NO. 661 and SEQ ID NO. 663. In an embodiment, the binding protein capable of binding HER-2 (seq. 1) and ErbB3 (seq. 3) comprises a DVD heavy chain amino acid sequence of SEQ ID NO. 660 and a DVD light chain amino acid sequence of SEQ ID NO: 661. In another embodiment, the binding protein capable of binding HER-2 (seq. 1) and ErbB3 (seq. 3) has a reverse orientation and comprises a DVD heavy chain amino acid sequence of SEQ ID NO. 662 and a DVD light chain amino acid sequence of SEQ ID NO: 663.

[0158] In a third embodiment, the binding protein capable of binding HER-2 (seq. 1) and ErbB3 (seq. 3) comprises a DVD heavy chain amino acid sequence selected from the group consisting of SEQ ID NO. 664 and SEQ ID NO. 666; and a DVD light chain amino acid sequence selected from the group consisting of SEQ ID NO. 665 and SEQ ID NO. 667. In an embodiment, the binding protein capable of binding HER-2 (seq. 1) and ErbB3 (seq. 3) comprises a DVD heavy chain amino acid sequence of SEQ ID NO. 664 and a DVD light chain amino acid sequence of SEQ ID NO: 665. In another embodiment, the binding protein capable of binding HER-2 (seq. 1) and ErbB3 (seq. 3) has a reverse orientation and comprises a DVD heavy chain amino acid sequence of SEQ ID NO. 666 and a DVD light chain amino acid sequence of SEQ ID NO: 667.

[0159] In a fourth embodiment, the binding protein capable of binding HER-2 (seq. 1) and ErbB3 (seq. 3) comprises a DVD heavy chain amino acid sequence selected from the group consisting of SEQ ID NO. 668 and SEQ ID NO. 670; and a DVD light chain amino acid sequence selected from the group consisting of SEQ ID NO. 669 and SEQ ID NO. 671. In an embodiment, the binding protein capable of binding HER-2 (seq. 1) and ErbB3 (seq. 3) comprises a DVD heavy chain amino acid sequence of SEQ ID NO. 668 and a DVD light chain amino acid sequence of SEQ ID NO: 669. In another embodiment, the binding protein capable of binding HER-2 (seq. 1) and ErbB3 (seq. 3) has a reverse orientation and comprises a DVD heavy chain amino acid sequence of SEQ ID NO. 670 and a DVD light chain amino acid sequence of SEQ ID NO: 671.

[0160] In an embodiment, the binding protein capable of binding VEGF (seq. 1) and PLGF (seq. 2) comprises a DVD heavy chain amino acid sequence selected from the group consisting of SEQ ID NO. 672 and SEQ ID NO. 674; and a DVD light chain amino acid sequence selected from the group consisting of SEQ ID NO. 673 and SEQ ID NO. 675. In an embodiment, the binding protein capable of binding VEGF (seq. 1) and PLGF (seq. 2) comprises a DVD heavy chain amino acid sequence of SEQ ID NO. 672 and a DVD light chain amino acid sequence of SEQ ID NO: 673. In another embodiment, the binding protein capable of binding VEGF (seq. 1) and PLGF (seq. 2) has a reverse orientation and comprises a DVD heavy chain amino acid sequence of SEQ ID NO. 674 and a DVD light chain amino acid sequence of SEQ ID NO: 675.

[0161] In a second embodiment, the binding protein capable of binding VEGF (seq. 1) and PLGF (seq. 2) comprises a DVD heavy chain amino acid sequence selected from the group consisting of SEQ ID NO. 676 and SEQ ID NO. 678; and a DVD light chain amino acid sequence selected from the group consisting of SEQ ID NO. 677 and SEQ ID NO. 679. In an embodiment, the binding protein capable of binding VEGF (seq. 1) and PLGF (seq. 2) comprises a DVD heavy chain amino acid sequence of SEQ ID NO. 676 and a DVD light chain amino acid sequence of SEQ ID NO: 677. In another embodiment, the binding protein capable of binding VEGF (seq. 1) and PLGF (seq. 2) has a reverse orientation and comprises a DVD heavy chain amino acid sequence of SEQ ID NO. 678 and a DVD light chain amino acid sequence of SEQ ID NO: 679. (Table 195)

[0162] In a third embodiment, the binding protein capable of binding VEGF (seq. 1) and PLGF (seq. 2) comprises a DVD heavy chain amino acid sequence selected from the group consisting of SEQ ID NO. 667 and SEQ ID NO. 669; and a DVD light chain amino acid sequence selected from the group consisting of SEQ ID NO. 668 and SEQ ID NO. 670. In an embodiment, the binding protein capable of binding VEGF (seq. 1) and PLGF (seq. 2) comprises a DVD heavy chain amino acid sequence of SEQ ID NO. 667 and a DVD light chain amino acid sequence of SEQ ID NO: 668. In another embodiment, the binding protein capable of binding VEGF (seq. 1) and PLGF (seq. 2) has a reverse orientation and comprises a DVD heavy chain amino acid sequence of SEQ ID NO. 669 and a DVD light chain amino acid sequence of SEQ ID NO: 670. (Table 196)

[0163] In a fourth embodiment, the binding protein capable of binding VEGF (seq. 1) and PLGF (seq. 2) comprises a DVD heavy chain amino acid sequence selected from the group consisting of SEQ ID NO. 671 and SEQ ID NO. 673; and a DVD light chain amino acid sequence selected from the group consisting of SEQ ID NO. 672 and SEQ ID NO. 674. In an embodiment, the binding protein capable of binding VEGF (seq. 1) and PLGF (seq. 2) comprises a DVD heavy chain amino acid sequence of SEQ ID NO. 671 and a DVD light chain amino acid sequence of SEQ ID NO: 672. In another embodiment, the binding protein capable of binding VEGF (seq. 1) and PLGF (seq. 2) has a reverse orientation and comprises a DVD heavy chain amino acid sequence of SEQ ID NO. 673 and a DVD light chain amino acid sequence of SEQ ID NO: 674. (Table 197)

[0164] In an embodiment, the binding protein capable of binding VEGF (seq. 2) and PLGF (seq. 2) comprises a DVD heavy chain amino acid sequence selected from the group consisting of SEQ ID NO. 675 and SEQ ID NO. 677; and a DVD light chain amino acid sequence selected from the group consisting of SEQ ID NO. 676 and SEQ ID NO. 678. In an embodiment, the binding protein capable of binding VEGF (seq. 2) and PLGF (seq. 2) comprises a DVD heavy chain amino acid sequence of SEQ ID NO. 675 and a DVD light chain amino acid sequence of SEQ ID NO: 676. In another embodiment, the binding protein capable of binding VEGF (seq. 2) and PLGF (seq. 2) has a reverse orientation and comprises a DVD heavy chain amino acid sequence of SEQ ID NO. 677 and a DVD light chain amino acid sequence of SEQ ID NO: 678. (Table 198)

[0165] In a second embodiment, the binding protein capable of binding VEGF (seq. 2) and PLGF (seq. 2) comprises a DVD heavy chain amino acid sequence selected from the group consisting of SEQ ID NO. 679 and SEQ ID NO. 681; and a DVD light chain amino acid sequence selected from the group consisting of SEQ ID NO. 680 and SEQ ID NO. 682. In an embodiment, the binding protein capable of binding VEGF (seq. 2) and PLGF (seq. 2) comprises a DVD heavy chain amino acid sequence of SEQ ID NO. 679 and a DVD light chain amino acid sequence of SEQ ID NO: 680. In another embodiment, the binding protein capable of binding VEGF (seq. 2) and PLGF (seq. 2) has a reverse orientation and comprises a DVD heavy chain amino acid sequence of SEQ ID NO. 681 and a DVD light chain amino acid sequence of SEQ ID NO: 682. (Table 199)

[0166] In a third embodiment, the binding protein capable of binding VEGF (seq. 2) and PLGF (seq. 2) comprises a DVD heavy chain amino acid sequence selected from the group consisting of SEQ ID NO. 683 and SEQ ID NO. 685; and a DVD light chain amino acid sequence selected from the group consisting of SEQ ID NO. 684 and SEQ ID NO. 686. In an embodiment, the binding protein capable of binding VEGF (seq. 2) and PLGF (seq. 2) comprises a DVD heavy chain amino acid sequence of SEQ ID NO. 683 and a DVD light chain amino acid sequence of SEQ ID NO: 684. In another embodiment, the binding protein capable of binding VEGF (seq. 2) and PLGF (seq. 2) has a reverse orientation and comprises a DVD heavy chain amino acid sequence of SEQ ID NO. 685 and a DVD light chain amino acid sequence of SEQ ID NO: 686. (Table 200)

[0167] In a fourth embodiment, the binding protein capable of binding VEGF (seq. 2) and PLGF (seq. 2) comprises a DVD heavy chain amino acid sequence selected from the group consisting of SEQ ID NO. 687 and SEQ ID NO. 689; and a DVD light chain amino acid sequence selected from the group consisting of SEQ ID NO. 688 and SEQ ID NO. 690. In an embodiment, the binding protein capable of binding VEGF (seq. 2) and PLGF (seq. 2) comprises a DVD heavy chain amino acid sequence of SEQ ID NO. 687 and a DVD light chain amino acid sequence of SEQ ID NO: 688. In another embodiment, the binding protein capable of binding VEGF (seq. 2) and PLGF (seq. 2) has a reverse orientation and comprises a DVD heavy chain amino acid sequence of SEQ ID NO. 689 and a DVD light chain amino acid sequence of SEQ ID NO: 690. (Table 201)

[0168] In an embodiment, the binding protein capable of binding VEGF (seq. 3) and PLGF (seq. 2) comprises a DVD heavy chain amino acid sequence selected from the group consisting of SEQ ID NO. 691 and SEQ ID NO. 693; and a DVD light chain amino acid sequence selected from the group consisting of SEQ ID NO. 692 and SEQ ID NO. 694. In an embodiment, the binding protein capable of binding VEGF (seq. 3) and PLGF (seq. 2) comprises a DVD heavy chain amino acid sequence of SEQ ID NO. 691 and a DVD light chain amino acid sequence of SEQ ID NO: 692. In another embodiment, the binding protein capable of binding VEGF (seq. 3) and PLGF (seq. 2) has a reverse orientation and comprises a DVD heavy chain amino acid sequence of SEQ ID NO. 693 and a DVD light chain amino acid sequence of SEQ ID NO: 694. (Table 202)

[0169] In a second embodiment, the binding protein capable of binding VEGF (seq. 3) and PLGF (seq. 2) comprises a DVD heavy chain amino acid sequence selected from the group consisting of SEQ ID NO. 695 and SEQ ID NO. 697; and a DVD light chain amino acid sequence selected from the group consisting of SEQ ID NO. 696 and SEQ ID NO. 698. In an embodiment, the binding protein capable of binding VEGF (seq. 3) and PLGF (seq. 2) comprises a DVD heavy chain amino acid sequence of SEQ ID NO. 695 and a DVD light chain amino acid sequence of SEQ ID NO: 696. In another embodiment, the binding protein capable of binding VEGF (seq. 3) and PLGF (seq. 2) has a reverse orientation and comprises a DVD heavy chain amino acid sequence of SEQ ID NO. 697 and a DVD light chain amino acid sequence of SEQ ID NO: 698. (Table 203)

[0170] In a third embodiment, the binding protein capable of binding VEGF (seq. 3) and PLGF (seq. 2) comprises a DVD heavy chain amino acid sequence selected from the group consisting of SEQ ID NO. 699 and SEQ ID NO. 701; and a DVD light chain amino acid sequence selected from the group consisting of SEQ ID NO. 700 and SEQ ID NO. 702. In an embodiment, the binding protein capable of binding VEGF (seq. 3) and PLGF (seq. 2) comprises a DVD heavy chain amino acid sequence of SEQ ID NO. 699 and a DVD light chain amino acid sequence of SEQ ID NO: 700. In another embodiment, the binding protein capable of binding VEGF (seq. 3) and PLGF (seq. 2) has a reverse orientation and comprises a DVD heavy chain amino acid sequence of SEQ ID NO. 701 and a DVD light chain amino acid sequence of SEQ ID NO: 702. (Table 204)

[0171] In a fourth embodiment, the binding protein capable of binding VEGF (seq. 3) and PLGF (seq. 2) comprises a DVD heavy chain amino acid sequence selected from the group consisting of SEQ ID NO. 703 and SEQ ID NO. 705; and a DVD light chain amino acid sequence selected from the group consisting of SEQ ID NO. 704 and SEQ ID NO. 706. In an embodiment, the binding protein capable of binding VEGF (seq. 3) and PLGF (seq. 2) comprises a DVD heavy chain amino acid sequence of SEQ ID NO. 703 and a DVD light chain amino acid sequence of SEQ ID NO: 704. In another embodiment, the binding protein capable of binding VEGF (seq. 3) and PLGF (seq. 2) has a reverse orientation and comprises a DVD heavy chain amino acid sequence of SEQ ID NO. 705 and a DVD light chain amino acid sequence of SEQ ID NO: 706. (Table 205)

[0172] In an embodiment, the binding protein capable of binding HER-2 (seq. 1) and PLGF (seq. 2) comprises a DVD heavy chain amino acid sequence selected from the group consisting of SEQ ID NO. 707 and SEQ ID NO. 709; and a DVD light chain amino acid sequence selected from the group consisting of SEQ ID NO. 708 and SEQ ID NO. 710. In an embodiment, the binding protein capable of binding HER-2 (seq. 1) and PLGF (seq. 2) comprises a DVD heavy chain amino acid sequence of SEQ ID NO. 707 and a DVD light chain amino acid sequence of SEQ ID NO: 708. In another embodiment, the binding protein capable of binding HER-2 (seq. 1) and PLGF (seq. 2) has a reverse orientation and comprises a DVD heavy chain amino acid sequence of SEQ ID NO. 709 and a DVD light chain amino acid sequence of SEQ ID NO: 710. (Table 206)

[0173] In a second embodiment, the binding protein capable of binding HER-2 (seq. 1) and PLGF (seq. 2) comprises a DVD heavy chain amino acid sequence selected from the group consisting of SEQ ID NO. 711 and SEQ ID NO. 713; and a DVD light chain amino acid sequence selected from the group consisting of SEQ ID NO. 712 and SEQ ID NO. 714. In an embodiment, the binding protein capable of binding HER-2 (seq. 1) and PLGF (seq. 2) comprises a DVD heavy chain amino acid sequence of SEQ ID NO. 711 and a DVD light chain amino acid sequence of SEQ ID NO: 712. In another embodiment, the binding protein capable of binding HER-2 (seq. 1) and PLGF (seq. 2) has a reverse orientation and comprises a DVD heavy chain amino acid sequence of SEQ ID NO. 713 and a DVD light chain amino acid sequence of SEQ ID NO: 714. (Table 207)

[0174] In a third embodiment, the binding protein capable of binding HER-2 (seq. 1) and PLGF (seq. 2) comprises a DVD heavy chain amino acid sequence selected from the group consisting of SEQ ID NO. 715 and SEQ ID NO. 717; and a DVD light chain amino acid sequence selected from the group consisting of SEQ ID NO. 716 and SEQ ID NO. 718. In an embodiment, the binding protein capable of binding HER-2 (seq. 1) and PLGF (seq. 2) comprises a DVD heavy chain amino acid sequence of SEQ ID NO. 715 and a DVD light chain amino acid sequence of SEQ ID NO: 716. In another embodiment, the binding protein capable of binding HER-2 (seq. 1) and PLGF (seq. 2) has a reverse orientation and comprises a DVD heavy chain amino acid sequence of SEQ ID NO. 717 and a DVD light chain amino acid sequence of SEQ ID NO: 718. (Table 208)

[0175] In a fourth embodiment, the binding protein capable of binding HER-2 (seq. 1) and PLGF (seq. 2) comprises a DVD heavy chain amino acid sequence selected from the group consisting of SEQ ID NO. 719 and SEQ ID NO. 721; and a DVD light chain amino acid sequence selected from the group consisting of SEQ ID NO. 720 and SEQ ID NO. 722. In an embodiment, the binding protein capable of binding HER-2 (seq. 1) and PLGF (seq. 2) comprises a DVD heavy chain amino acid sequence of SEQ ID NO. 719 and a DVD light chain amino acid sequence of SEQ ID NO: 720. In another embodiment, the binding protein capable of binding HER-2 (seq. 1) and PLGF (seq. 2) has a reverse orientation and comprises a DVD heavy chain amino acid sequence of SEQ ID NO. 721 and a DVD light chain amino acid sequence of SEQ ID NO: 722. (Table 209)

[0176] In an embodiment, the binding protein capable of binding PLGF (seq. 1) and VEGF (seq. 2) comprises a DVD heavy chain amino acid sequence selected from the group consisting of SEQ ID NO. 723 and SEQ ID NO. 725; and a DVD light chain amino acid sequence selected from the group consisting of SEQ ID NO. 724 and SEQ ID NO. 726. In an embodiment, the binding protein capable of binding PLGF (seq. 1) and VEGF (seq. 2) comprises a DVD heavy chain amino acid sequence of SEQ ID NO. 723 and a DVD light chain amino acid sequence of SEQ ID NO: 724. In another embodiment, the binding protein capable of binding PLGF (seq. 1) and VEGF (seq. 2) has a reverse orientation and comprises a DVD heavy chain amino acid sequence of SEQ ID NO. 725 and a DVD light chain amino acid sequence of SEQ ID NO: 726. (Table 210)

[0177] In a second embodiment, the binding protein capable of binding PLGF (seq. 1) and VEGF (seq. 2) comprises a DVD heavy chain amino acid sequence selected from the group consisting of SEQ ID NO. 727 and SEQ ID NO. 729; and a DVD light chain amino acid sequence selected from the group consisting of SEQ ID NO. 728 and SEQ ID NO. 730. In an embodiment, the binding protein capable of binding PLGF (seq. 1) and VEGF (seq. 2) comprises a DVD heavy chain amino acid sequence of SEQ ID NO. 727 and a DVD light chain amino acid sequence of SEQ ID NO: 728. In another embodiment, the binding protein capable of binding PLGF (seq. 1) and VEGF (seq. 2) has a reverse orientation and comprises a DVD heavy chain amino acid sequence of SEQ ID NO. 729 and a DVD light chain amino acid sequence of SEQ ID NO: 730. (Table 211)

[0178] In a third embodiment, the binding protein capable of binding PLGF (seq. 1) and VEGF (seq. 2) comprises a DVD heavy chain amino acid sequence selected from the group consisting of SEQ ID NO. 731 and SEQ ID NO. 733; and a DVD light chain amino acid sequence selected from the group consisting of SEQ ID NO. 732 and SEQ ID NO. 734. In an embodiment, the binding protein capable of binding PLGF (seq. 1) and VEGF (seq. 2) comprises a DVD heavy chain amino acid sequence of SEQ ID NO. 731 and a DVD light chain amino acid sequence of SEQ ID NO: 732. In another embodiment, the binding protein capable of binding PLGF (seq. 1) and VEGF (seq. 2) has a reverse orientation and comprises a DVD heavy chain amino acid sequence of SEQ ID NO. 733 and a DVD light chain amino acid sequence of SEQ ID NO: 734. (Table 212)

[0179] In a fourth embodiment, the binding protein capable of binding PLGF (seq. 1) and VEGF (seq. 2) comprises a DVD heavy chain amino acid sequence selected from the group consisting of SEQ ID NO. 735 and SEQ ID NO. 737; and a DVD light chain amino acid sequence selected from the group consisting of SEQ ID NO. 736 and SEQ ID NO. 738. In an embodiment, the binding protein capable of binding PLGF (seq. 1) and VEGF (seq. 2) comprises a DVD heavy chain amino acid sequence of SEQ ID NO. 735 and a DVD light chain amino acid sequence of SEQ ID NO: 736. In another embodiment, the binding protein capable of binding PLGF (seq. 1) and VEGF (seq. 2) has a reverse orientation and comprises a DVD heavy chain amino acid sequence of SEQ ID NO. 737 and a DVD light chain amino acid sequence of SEQ ID NO: 738. (Table 213)

[0180] In an embodiment, the binding protein capable of binding PLGF (seq. 1) and VEGF (seq. 3) comprises a DVD heavy chain amino acid sequence selected from the group consisting of SEQ ID NO. 739 and SEQ ID NO. 741; and a DVD light chain amino acid sequence selected from the group consisting of SEQ ID NO. 740 and SEQ ID NO. 742. In an embodiment, the binding protein capable of binding PLGF (seq. 1) and VEGF (seq. 3) comprises a DVD heavy chain amino acid sequence of SEQ ID NO. 739 and a DVD light chain amino acid sequence of SEQ ID NO: 740. In another embodiment, the binding protein capable of binding PLGF (seq. 1) and VEGF (seq. 3) has a reverse orientation and comprises a DVD heavy chain amino acid sequence of SEQ ID NO. 741 and a DVD light chain amino acid sequence of SEQ ID NO: 742. (Table 214)

[0181] In a second embodiment, the binding protein capable of binding PLGF (seq. 1) and VEGF (seq. 3) comprises a DVD heavy chain amino acid sequence selected from the group consisting of SEQ ID NO. 743 and SEQ ID NO. 745; and a DVD light chain amino acid sequence selected from the group consisting of SEQ ID NO. 744 and SEQ ID NO. 746. In an embodiment, the binding protein capable of binding PLGF (seq. 1) and VEGF (seq. 3) comprises a DVD heavy chain amino acid sequence of SEQ ID NO. 743 and a DVD light chain amino acid sequence of SEQ ID NO: 744. In another embodiment, the binding protein capable of binding PLGF (seq. 1) and VEGF (seq. 3) has a reverse orientation and comprises a DVD heavy chain amino acid sequence of SEQ ID NO. 745 and a DVD light chain amino acid sequence of SEQ ID NO: 746. (Table 215)

[0182] In a third embodiment, the binding protein capable of binding PLGF (seq. 1) and VEGF (seq. 3) comprises a DVD heavy chain amino acid sequence selected from the group consisting of SEQ ID NO. 747 and SEQ ID NO. 749; and a DVD light chain amino acid sequence selected from the group consisting of SEQ ID NO. 748 and SEQ ID NO. 750. In an embodiment, the binding protein capable of binding PLGF (seq. 1) and VEGF (seq. 3) comprises a DVD heavy chain amino acid sequence of SEQ ID NO. 747 and a DVD light chain amino acid sequence of SEQ ID NO: 748. In another embodiment, the binding protein capable of binding PLGF (seq. 1) and VEGF (seq. 3) has a reverse orientation and comprises a DVD heavy chain amino acid sequence of SEQ ID NO. 749 and a DVD light chain amino acid sequence of SEQ ID NO: 750. (Table 216)

[0183] In a fourth embodiment, the binding protein capable of binding PLGF (seq. 1) and VEGF (seq. 3) comprises a DVD heavy chain amino acid sequence selected from the group consisting of SEQ ID NO. 751 and SEQ ID NO. 753; and a DVD light chain amino acid sequence selected from the group consisting of SEQ ID NO. 752 and SEQ ID NO. 754. In an embodiment, the binding protein capable of binding PLGF (seq. 1) and VEGF (seq. 3) comprises a DVD heavy chain amino acid sequence of SEQ ID NO. 751 and a DVD light chain amino acid sequence of SEQ ID NO: 752. In another embodiment, the binding protein capable of binding PLGF (seq. 1) and VEGF (seq. 3) has a reverse orientation and comprises a DVD heavy chain amino acid sequence of SEQ ID NO. 753 and a DVD light chain amino acid sequence of SEQ ID NO: 754. (Table 217)

[0184] In an embodiment, the binding protein capable of binding HER-2 (seq. 1) and PLGF (seq. 1) comprises a DVD heavy chain amino acid sequence selected from the group consisting of SEQ ID NO. 755 and SEQ ID NO. 757; and a DVD light chain amino acid sequence selected from the group consisting of SEQ ID NO. 756 and SEQ ID NO. 758. In an embodiment, the binding protein capable of binding HER-2 (seq. 1) and PLGF (seq. 1) comprises a DVD heavy chain amino acid sequence of SEQ ID NO. 755 and a DVD light chain amino acid sequence of SEQ ID NO: 756. In another embodiment, the binding protein capable of binding HER-2 (seq. 1) and PLGF (seq. 1) has a reverse orientation and comprises a DVD heavy chain amino acid sequence of SEQ ID NO. 757 and a DVD light chain amino acid sequence of SEQ ID NO: 758. (Table 218)

[0185] In a second embodiment, the binding protein capable of binding HER-2 (seq. 1) and PLGF (seq. 1) comprises a DVD heavy chain amino acid sequence selected from the group consisting of SEQ ID NO. 759 and SEQ ID NO. 761; and a DVD light chain amino acid sequence selected from the group consisting of SEQ ID NO. 760 and SEQ ID NO. 762. In an embodiment, the binding protein capable of binding HER-2 (seq. 1) and PLGF (seq. 1) comprises a DVD heavy chain amino acid sequence of SEQ ID NO. 759 and a DVD light chain amino acid sequence of SEQ ID NO: 760. In another embodiment, the binding protein capable of binding HER-2 (seq. 1) and PLGF (seq. 1) has a reverse orientation and comprises a DVD heavy chain amino acid sequence of SEQ ID NO. 761 and a DVD light chain amino acid sequence of SEQ ID NO: 762. (Table 219)

[0186] In a third embodiment, the binding protein capable of binding HER-2 (seq. 1) and PLGF (seq. 1) comprises a DVD heavy chain amino acid sequence selected from the group consisting of SEQ ID NO. 763 and SEQ ID NO. 765; and a DVD light chain amino acid sequence selected from the group consisting of SEQ ID NO. 764 and SEQ ID NO. 766. In an embodiment, the binding protein capable of binding HER-2 (seq. 1) and PLGF (seq. 1) comprises a DVD heavy chain amino acid sequence of SEQ ID NO. 763 and a DVD light chain amino acid sequence of SEQ ID NO: 764. In another embodiment, the binding protein capable of binding HER-2 (seq. 1) and PLGF (seq. 1) has a reverse orientation and comprises a DVD heavy chain amino acid sequence of SEQ ID NO. 765 and a DVD light chain amino acid sequence of SEQ ID NO: 766. (Table 220)

[0187] In a fourth embodiment, the binding protein capable of binding HER-2 (seq. 1) and PLGF (seq. 1) comprises a DVD heavy chain amino acid sequence selected from the group consisting of SEQ ID NO. 767 and SEQ ID NO. 769; and a DVD light chain amino acid sequence selected from the group consisting of SEQ ID NO. 768 and SEQ ID NO. 770. In an embodiment, the binding protein capable of binding HER-2 (seq. 1) and PLGF (seq. 1) comprises a DVD heavy chain amino acid sequence of SEQ ID NO. 767 and a DVD light chain amino acid sequence of SEQ ID NO: 768. In another embodiment, the binding protein capable of binding HER-2 (seq. 1) and PLGF (seq. 1) has a reverse orientation and comprises a DVD heavy chain amino acid sequence of SEQ ID NO. 769 and a DVD light chain amino acid sequence of SEQ ID NO: 770. (Table 221)

[0188] In an embodiment, the binding protein capable of binding HGF (seq. 1) and VEGF (seq. 2) comprises a DVD heavy chain amino acid sequence selected from the group consisting of SEQ ID NO. 771 and SEQ ID NO. 773; and a DVD light chain amino acid sequence selected from the group consisting of SEQ ID NO. 772 and SEQ ID NO. 774. In an embodiment, the binding protein capable of binding HGF (seq. 1) and VEGF (seq. 2) comprises a DVD heavy chain amino acid sequence of SEQ ID NO. 771 and a DVD light chain amino acid sequence of SEQ ID NO: 772. In another embodiment, the binding protein capable of binding HGF (seq. 1) and VEGF (seq. 2) has a reverse orientation and comprises a DVD heavy chain amino acid sequence of SEQ ID NO. 773 and a DVD light chain amino acid sequence of SEQ ID NO: 774. (Table 222)

[0189] In a second embodiment, the binding protein capable of binding HGF (seq. 1) and VEGF (seq. 2) comprises a DVD heavy chain amino acid sequence selected from the group consisting of SEQ ID NO. 775 and SEQ ID NO. 777; and a DVD light chain amino acid sequence selected from the group consisting of SEQ ID NO. 776 and SEQ ID NO. 778. In an embodiment, the binding protein capable of binding HGF (seq. 1) and VEGF (seq. 2) comprises a DVD heavy chain amino acid sequence of SEQ ID NO. 775 and a DVD light chain amino acid sequence of SEQ ID NO: 776. In another embodiment, the binding protein capable of binding HGF (seq. 1) and VEGF (seq. 2) has a reverse orientation and comprises a DVD heavy chain amino acid sequence of SEQ ID NO. 777 and a DVD light chain amino acid sequence of SEQ ID NO: 778. (Table 223)

[0190] In a third embodiment, the binding protein capable of binding HGF (seq. 1) and VEGF (seq. 2) comprises a DVD heavy chain amino acid sequence selected from the group consisting of SEQ ID NO. 779 and SEQ ID NO. 781; and a DVD light chain amino acid sequence selected from the group consisting of SEQ ID NO. 780 and SEQ ID NO. 782. In an embodiment, the binding protein capable of binding HGF (seq. 1) and VEGF (seq. 2) comprises a DVD heavy chain amino acid sequence of SEQ ID NO. 779 and a DVD light chain amino acid sequence of SEQ ID NO: 780. In another embodiment, the binding protein capable of binding HGF (seq. 1) and VEGF (seq. 2) has a reverse orientation and comprises a DVD heavy chain amino acid sequence of SEQ ID NO. 781 and a DVD light chain amino acid sequence of SEQ ID NO: 782. (Table 224)

[0191] In a fourth embodiment, the binding protein capable of binding HGF (seq. 1) and VEGF (seq. 2) comprises a DVD heavy chain amino acid sequence selected from the group consisting of SEQ ID NO. 783 and SEQ ID NO. 785; and a DVD light chain amino acid sequence selected from the group consisting of SEQ ID NO. 784 and SEQ ID NO. 786. In an embodiment, the binding protein capable of binding HGF (seq. 1) and VEGF (seq. 2) comprises a DVD heavy chain amino acid sequence of SEQ ID NO. 783 and a DVD light chain amino acid sequence of SEQ ID NO: 784. In another embodiment, the binding protein capable of binding HGF (seq. 1) and VEGF (seq. 2) has a reverse orientation and comprises a DVD heavy chain amino acid sequence of SEQ ID NO. 785 and a DVD light chain amino acid sequence of SEQ ID NO: 786. (Table 225)

[0192] In an embodiment, the binding protein capable of binding HGF (seq. 1) and VEGF (seq. 3) comprises a DVD heavy chain amino acid sequence selected from the group consisting of SEQ ID NO. 787 and SEQ ID NO. 789; and a DVD light chain amino acid sequence selected from the group consisting of SEQ ID NO. 788 and SEQ ID NO. 790. In an embodiment, the binding protein capable of binding HGF (seq. 1) and VEGF (seq. 3) comprises a DVD heavy chain amino acid sequence of SEQ ID NO. 787 and a DVD light chain amino acid sequence of SEQ ID NO: 788. In another embodiment, the binding protein capable of binding HGF (seq. 1) and VEGF (seq. 3) has a reverse orientation and comprises a DVD heavy chain amino acid sequence of SEQ ID NO. 789 and a DVD light chain amino acid sequence of SEQ ID NO: 790. (Table 226)

[0193] In a second embodiment, the binding protein capable of binding HGF (seq. 1) and VEGF (seq. 3) comprises a DVD heavy chain amino acid sequence selected from the group consisting of SEQ ID NO. 791 and SEQ ID NO. 793; and a DVD light chain amino acid sequence selected from the group consisting of SEQ ID NO. 792 and SEQ ID NO. 794. In an embodiment, the binding protein capable of binding HGF (seq. 1) and VEGF (seq. 3) comprises a DVD heavy chain amino acid sequence of SEQ ID NO. 791 and a DVD light chain amino acid sequence of SEQ ID NO: 792. In another embodiment, the binding protein capable of binding HGF (seq. 1) and VEGF (seq. 3) has a reverse orientation and comprises a DVD heavy chain amino acid sequence of SEQ ID NO. 793 and a DVD light chain amino acid sequence of SEQ ID NO: 794. (Table 227)

[0194] In a third embodiment, the binding protein capable of binding HGF (seq. 1) and VEGF (seq. 3) comprises a DVD heavy chain amino acid sequence selected from the group consisting of SEQ ID NO. 795 and SEQ ID NO. 797; and a DVD light chain amino acid sequence selected from the group consisting of SEQ ID NO. 796 and SEQ ID NO. 798. In an embodiment, the binding protein capable of binding HGF (seq. 1) and VEGF (seq. 3) comprises a DVD heavy chain amino acid sequence of SEQ ID NO. 795 and a DVD light chain amino acid sequence of SEQ ID NO: 796. In another embodiment, the binding protein capable of binding HGF (seq. 1) and VEGF (seq. 3) has a reverse orientation and comprises a DVD heavy chain amino acid sequence of SEQ ID NO. 797 and a DVD light chain amino acid sequence of SEQ ID NO: 798. (Table 228)

[0195] In a fourth embodiment, the binding protein capable of binding HGF (seq. 1) and VEGF (seq. 3) comprises a DVD heavy chain amino acid sequence selected from the group consisting of SEQ ID NO. 799 and SEQ ID NO. 801; and a DVD light chain amino acid sequence selected from the group consisting of SEQ ID NO. 800 and SEQ ID NO. 802. In an embodiment, the binding protein capable of binding HGF (seq. 1) and VEGF (seq. 3) comprises a DVD heavy chain amino acid sequence of SEQ ID NO. 799 and a DVD light chain amino acid sequence of SEQ ID NO: 800. In another embodiment, the binding protein capable of binding HGF (seq. 1) and VEGF (seq. 3) has a reverse orientation and comprises a DVD heavy chain amino acid sequence of SEQ ID NO. 801 and a DVD light chain amino acid sequence of SEQ ID NO: 802. (Table 229)

[0196] In an embodiment, the binding protein capable of binding HGF (seq. 2) and VEGF (seq. 1) comprises a DVD heavy chain amino acid sequence selected from the group consisting of SEQ ID NO. 803 and SEQ ID NO. 805; and a DVD light chain amino acid sequence selected from the group consisting of SEQ ID NO. 804 and SEQ ID NO. 806. In an embodiment, the binding protein capable of binding HGF (seq. 2) and VEGF (seq. 1) comprises a DVD heavy chain amino acid sequence of SEQ ID NO. 803 and a DVD light chain amino acid sequence of SEQ ID NO: 804. In another embodiment, the binding protein capable of binding HGF (seq. 2) and VEGF (seq. 1) has a reverse orientation and comprises a DVD heavy chain amino acid sequence of SEQ ID NO. 805 and a DVD light chain amino acid sequence of SEQ ID NO: 806. (Table 230)

[0197] In a second embodiment, the binding protein capable of binding HGF (seq. 2) and VEGF (seq. 1) comprises a DVD heavy chain amino acid sequence selected from the group consisting of SEQ ID NO. 807 and SEQ ID NO. 809; and a DVD light chain amino acid sequence selected from the group consisting of SEQ ID NO. 808 and SEQ ID NO. 810. In an embodiment, the binding protein capable of binding HGF (seq. 2) and VEGF (seq. 1) comprises a DVD heavy chain amino acid sequence of SEQ ID NO. 807 and a DVD light chain amino acid sequence of SEQ ID NO: 808. In another embodiment, the binding protein capable of binding HGF (seq. 2) and VEGF (seq. 1) has a reverse orientation and comprises a DVD heavy chain amino acid sequence of SEQ ID NO. 809 and a DVD light chain amino acid sequence of SEQ ID NO: 810. (Table 231)

[0198] In a third embodiment, the binding protein capable of binding HGF (seq. 2) and VEGF (seq. 1) comprises a DVD heavy chain amino acid sequence selected from the group consisting of SEQ ID NO. 811 and SEQ ID NO. 813; and a DVD light chain amino acid sequence selected from the group consisting of SEQ ID NO. 812 and SEQ ID NO. 814. In an embodiment, the binding protein capable of binding HGF (seq. 2) and VEGF (seq. 1) comprises a DVD heavy chain amino acid sequence of SEQ ID NO. 811 and a DVD light chain amino acid sequence of SEQ ID NO: 812. In another embodiment, the binding protein capable of binding HGF (seq. 2) and VEGF (seq. 1) has a reverse orientation and comprises a DVD heavy chain amino acid sequence of SEQ ID NO. 813 and a DVD light chain amino acid sequence of SEQ ID NO: 814. (Table 232)

[0199] In a fourth embodiment, the binding protein capable of binding HGF (seq. 2) and VEGF (seq. 1) comprises a DVD heavy chain amino acid sequence selected from the group consisting of SEQ ID NO. 815 and SEQ ID NO. 817; and a DVD light chain amino acid sequence selected from the group consisting of SEQ ID NO. 816 and SEQ ID NO. 818. In an embodiment, the binding protein capable of binding HGF (seq. 2) and VEGF (seq. 1) comprises a DVD heavy chain amino acid sequence of SEQ ID NO. 815 and a DVD light chain amino acid sequence of SEQ ID NO: 816. In another embodiment, the binding protein capable of binding HGF (seq. 2) and VEGF (seq. 1) has a reverse orientation and comprises a DVD heavy chain amino acid sequence of SEQ ID NO. 817 and a DVD light chain amino acid sequence of SEQ ID NO: 818. (Table 233)

[0200] In an embodiment, the binding protein capable of binding HGF (seq. 2) and VEGF (seq. 2) comprises a DVD heavy chain amino acid sequence selected from the group consisting of SEQ ID NO. 819 and SEQ ID NO. 821; and a DVD light chain amino acid sequence selected from the group consisting of SEQ ID NO. 820 and SEQ ID NO. 822. In an embodiment, the binding protein capable of binding HGF (seq. 2) and VEGF (seq. 2) comprises a DVD heavy chain amino acid sequence of SEQ ID NO. 819 and a DVD light chain amino acid sequence of SEQ ID NO: 820. In another embodiment, the binding protein capable of binding HGF (seq. 2) and VEGF (seq. 2) has a reverse orientation and comprises a DVD heavy chain amino acid sequence of SEQ ID NO. 821 and a DVD light chain amino acid sequence of SEQ ID NO: 822. (Table 234)

[0201] In a second embodiment, the binding protein capable of binding HGF (seq. 2) and VEGF (seq. 2) comprises a DVD heavy chain amino acid sequence selected from the group consisting of SEQ ID NO. 823 and SEQ ID NO. 825; and a DVD light chain amino acid sequence selected from the group consisting of SEQ ID NO. 824 and SEQ ID NO. 826. In an embodiment, the binding protein capable of binding HGF (seq. 2) and VEGF (seq. 2) comprises a DVD heavy chain amino acid sequence of SEQ ID NO. 823 and a DVD light chain amino acid sequence of SEQ ID NO: 824. In another embodiment, the binding protein capable of binding HGF (seq. 2) and VEGF (seq. 2) has a reverse orientation and comprises a DVD heavy chain amino acid sequence of SEQ ID NO. 825 and a DVD light chain amino acid sequence of SEQ ID NO: 826. (Table 235)

[0202] In a third embodiment, the binding protein capable of binding HGF (seq. 2) and VEGF (seq. 2) comprises a DVD heavy chain amino acid sequence selected from the group consisting of SEQ ID NO. 827 and SEQ ID NO. 829; and a DVD light chain amino acid sequence selected from the group consisting of SEQ ID NO. 828 and SEQ ID NO. 830. In an embodiment, the binding protein capable of binding HGF (seq. 2) and VEGF (seq. 2) comprises a DVD heavy chain amino acid sequence of SEQ ID NO. 827 and a DVD light chain amino acid sequence of SEQ ID NO: 828. In another embodiment, the binding protein capable of binding HGF (seq. 2) and VEGF (seq. 2) has a reverse orientation and comprises a DVD heavy chain amino acid sequence of SEQ ID NO. 829 and a DVD light chain amino acid sequence of SEQ ID NO: 830. (Table 236)

[0203] In a fourth embodiment, the binding protein capable of binding HGF (seq. 2) and VEGF (seq. 2) comprises a DVD heavy chain amino acid sequence selected from the group consisting of SEQ ID NO. 831 and SEQ ID NO. 833; and a DVD light chain amino acid sequence selected from the group consisting of SEQ ID NO. 832 and SEQ ID NO. 834. In an embodiment, the binding protein capable of binding HGF (seq. 2) and VEGF (seq. 2) comprises a DVD heavy chain amino acid sequence of SEQ ID NO. 831 and a DVD light chain amino acid sequence of SEQ ID NO: 832. In another embodiment, the binding protein capable of binding HGF (seq. 2) and VEGF (seq. 2) has a reverse orientation and comprises a DVD heavy chain amino acid sequence of SEQ ID NO. 833 and a DVD light chain amino acid sequence of SEQ ID NO: 834. (Table 237)

[0204] In an embodiment, the binding protein capable of binding HGF (seq. 2) and VEGF (seq. 3) comprises a DVD heavy chain amino acid sequence selected from the group consisting of SEQ ID NO. 835 and SEQ ID NO. 837; and a DVD light chain amino acid sequence selected from the group consisting of SEQ ID NO. 836 and SEQ ID NO. 838. In an embodiment, the binding protein capable of binding HGF (seq. 2) and VEGF (seq. 3) comprises a DVD heavy chain amino acid sequence of SEQ ID NO. 835 and a DVD light chain amino acid sequence of SEQ ID NO: 836. In another embodiment, the binding protein capable of binding HGF (seq. 2) and VEGF (seq. 3) has a reverse orientation and comprises a DVD heavy chain amino acid sequence of SEQ ID NO. 837 and a DVD light chain amino acid sequence of SEQ ID NO: 838. (Table 238)

[0205] In a second embodiment, the binding protein capable of binding HGF (seq. 2) and VEGF (seq. 3) comprises a DVD heavy chain amino acid sequence selected from the group consisting of SEQ ID NO. 839 and SEQ ID NO. 841; and a DVD light chain amino acid sequence selected from the group consisting of SEQ ID NO. 840 and SEQ ID NO. 842. In an embodiment, the binding protein capable of binding HGF (seq. 2) and VEGF (seq. 3) comprises a DVD heavy chain amino acid sequence of SEQ ID NO. 839 and a DVD light chain amino acid sequence of SEQ ID NO: 840. In another embodiment, the binding protein capable of binding HGF (seq. 2) and VEGF (seq. 3) has a reverse orientation and comprises a DVD heavy chain amino acid sequence of SEQ ID NO. 841 and a DVD light chain amino acid sequence of SEQ ID NO: 842. (Table 239)

[0206] In a third embodiment, the binding protein capable of binding HGF (seq. 2) and VEGF (seq. 3) comprises a DVD heavy chain amino acid sequence selected from the group consisting of SEQ ID NO. 843 and SEQ ID NO. 845; and a DVD light chain amino acid sequence selected from the group consisting of SEQ ID NO. 844 and SEQ ID NO. 846. In an embodiment, the binding protein capable of binding HGF (seq. 2) and VEGF (seq. 3) comprises a DVD heavy chain amino acid sequence of SEQ ID NO. 843 and a DVD light chain amino acid sequence of SEQ ID NO: 844. In another embodiment, the binding protein capable of binding HGF (seq. 2) and VEGF (seq. 3) has a reverse orientation and comprises a DVD heavy chain amino acid sequence of SEQ ID NO. 845 and a DVD light chain amino acid sequence of SEQ ID NO: 846. (Table 240)

[0207] In a fourth embodiment, the binding protein capable of binding HGF (seq. 2) and VEGF (seq. 3) comprises a DVD heavy chain amino acid sequence selected from the group consisting of SEQ ID NO. 847 and SEQ ID NO. 849; and a DVD light chain amino acid sequence selected from the group consisting of SEQ ID NO. 848 and SEQ ID NO. 850. In an embodiment, the binding protein capable of binding HGF (seq. 2) and VEGF (seq. 3) comprises a DVD heavy chain amino acid sequence of SEQ ID NO. 847 and a DVD light chain amino acid sequence of SEQ ID NO: 848. In another embodiment, the binding protein capable of binding HGF (seq. 2) and VEGF (seq. 3) has a reverse orientation and comprises a DVD heavy chain amino acid sequence of SEQ ID NO. 849 and a DVD light chain amino acid sequence of SEQ ID NO: 850. (Table 241)

[0208] In an embodiment, the binding protein capable of binding HER-2 (seq. 1) and HER-2 (seq. 2) comprises a DVD heavy chain amino acid sequence selected from the group consisting of SEQ ID NO. 851 and SEQ ID NO. 853; and a DVD light chain amino acid sequence selected from the group consisting of SEQ ID NO. 852 and SEQ ID NO. 854. In an embodiment, the binding protein capable of binding HER-2 (seq. 1) and HER-2 (seq. 2) comprises a DVD heavy chain amino acid sequence of SEQ ID NO. 851 and a DVD light chain amino acid sequence of SEQ ID NO: 852. In another embodiment, the binding protein capable of binding HER-2 (seq. 1) and HER-2 (seq. 2) has a reverse orientation and comprises a DVD heavy chain amino acid sequence of SEQ ID NO. 853 and a DVD light chain amino acid sequence of SEQ ID NO: 854. (Table 242)

[0209] In a second embodiment, the binding protein capable of binding HER-2 (seq. 1) and HER-2 (seq. 2) comprises a DVD heavy chain amino acid sequence selected from the group consisting of SEQ ID NO. 855 and SEQ ID NO. 857; and a DVD light chain amino acid sequence selected from the group consisting of SEQ ID NO. 856 and SEQ ID NO. 858. In an embodiment, the binding protein capable of binding HER-2 (seq. 1) and HER-2 (seq. 2) comprises a DVD heavy chain amino acid sequence of SEQ ID NO. 855 and a DVD light chain amino acid sequence of SEQ ID NO: 856. In another embodiment, the binding protein capable of binding HER-2 (seq. 1) and HER-2 (seq. 2) has a reverse orientation and comprises a DVD heavy chain amino acid sequence of SEQ ID NO. 857 and a DVD light chain amino acid sequence of SEQ ID NO: 858. (Table 243)

[0210] In a third embodiment, the binding protein capable of binding HER-2 (seq. 1) and HER-2 (seq. 2) comprises a DVD heavy chain amino acid sequence selected from the group consisting of SEQ ID NO. 859 and SEQ ID NO. 861; and a DVD light chain amino acid sequence selected from the group consisting of SEQ ID NO. 860 and SEQ ID NO. 862. In an embodiment, the binding protein capable of binding HER-2 (seq. 1) and HER-2 (seq. 2) comprises a DVD heavy chain amino acid sequence of SEQ ID NO. 859 and a DVD light chain amino acid sequence of SEQ ID NO: 860. In another embodiment, the binding protein capable of binding HER-2 (seq. 1) and HER-2 (seq. 2) has a reverse orientation and comprises a DVD heavy chain amino acid sequence of SEQ ID NO. 861 and a DVD light chain amino acid sequence of SEQ ID NO: 862. (Table 244)

[0211] In a fourth embodiment, the binding protein capable of binding HER-2 (seq. 1) and HER-2 (seq. 2) comprises a DVD heavy chain amino acid sequence selected from the group consisting of SEQ ID NO. 863 and SEQ ID NO. 865; and a DVD light chain amino acid sequence selected from the group consisting of SEQ ID NO. 864 and SEQ ID NO. 866. In an embodiment, the binding protein capable of binding HER-2 (seq. 1) and HER-2 (seq. 2) comprises a DVD heavy chain amino acid sequence of SEQ ID NO. 863 and a DVD light chain amino acid sequence of SEQ ID NO: 864. In another embodiment, the binding protein capable of binding HER-2 (seq. 1) and HER-2 (seq. 2) has a reverse orientation and comprises a DVD heavy chain amino acid sequence of SEQ ID NO. 865 and a DVD light chain amino acid sequence of SEQ ID NO: 866. (Table 245)

[0212] In an embodiment, the binding protein capable of binding CD-3 (seq. 2) and CD-19 (seq. 2) comprises a DVD heavy chain amino acid sequence selected from the group consisting of SEQ ID NO. 881 and SEQ ID NO. 883; and a DVD light chain amino acid sequence selected from the group consisting of SEQ ID NO. 882 and SEQ ID NO. 884. In an embodiment, the binding protein capable of binding CD-3 (seq. 2) and CD-19 (seq. 2) comprises a DVD heavy chain amino acid sequence of SEQ ID NO. 881 and a DVD light chain amino acid sequence of SEQ ID NO: 882. In another embodiment, the binding protein capable of binding CD-3 (seq. 2) and CD-19 (seq. 2) has a reverse orientation and comprises a DVD heavy chain amino acid sequence of SEQ ID NO. 883 and a DVD light chain amino acid sequence of SEQ ID NO: 884. (Table 246)

[0213] In an embodiment, the binding protein capable of binding CD-3 (seq. 3) and CD-19 (seq. 2) comprises a DVD heavy chain amino acid sequence selected from the group consisting of SEQ ID NO. 885 and SEQ ID NO. 887; and a DVD light chain amino acid sequence selected from the group consisting of SEQ ID NO. 886 and SEQ ID NO. 888. In an embodiment, the binding protein capable of binding CD-3 (seq. 3) and CD-19 (seq. 2) comprises a DVD heavy chain amino acid sequence of SEQ ID NO. 885 and a DVD light chain amino acid sequence of SEQ ID NO: 886. In another embodiment, the binding protein capable of binding CD-3 (seq. 3) and CD-19 (seq. 2) has a reverse orientation and comprises a DVD heavy chain amino acid sequence of SEQ ID NO. 887 and a DVD light chain amino acid sequence of SEQ ID NO: 888. (Table 247)

[0214] In an embodiment, the binding protein capable of binding CD-3 (seq. 2) and CD-19 (seq. 3) comprises a DVD heavy chain amino acid sequence selected from the group consisting of SEQ ID NO. 889 and SEQ ID NO. 891; and a DVD light chain amino acid sequence selected from the group consisting of SEQ ID NO. 890 and SEQ ID NO. 892. In an embodiment, the binding protein capable of binding CD-3 (seq. 2) and CD-19 (seq. 3) comprises a DVD heavy chain amino acid sequence of SEQ ID NO. 889 and a DVD light chain amino acid sequence of SEQ ID NO: 890. In another embodiment, the binding protein capable of binding CD-3 (seq. 2) and CD-19 (seq. 3) has a reverse orientation and comprises a DVD heavy chain amino acid sequence of SEQ ID NO. 891 and a DVD light chain amino acid sequence of SEQ ID NO: 892. (Table 248)

[0215] In an embodiment, the binding protein capable of binding CD-3 (seq. 3) and CD-19 (seq. 3) comprises a DVD heavy chain amino acid sequence selected from the group consisting of SEQ ID NO. 893 and SEQ ID NO. 895; and a DVD light chain amino acid sequence selected from the group consisting of SEQ ID NO. 894 and SEQ ID NO. 896. In an embodiment, the binding protein capable of binding CD-3 (seq. 3) and CD-19 (seq. 3) comprises a DVD heavy chain amino acid sequence of SEQ ID NO. 893 and a DVD light chain amino acid sequence of SEQ ID NO: 894. In another embodiment, the binding protein capable of binding CD-3 (seq. 3) and CD-19 (seq. 3) has a reverse orientation and comprises a DVD heavy chain amino acid sequence of SEQ ID NO. 895 and a DVD light chain amino acid sequence of SEQ ID NO: 896. (Table 249)

[0216] In an embodiment, the binding protein capable of binding CD-3 (seq. 2) and CD-19 (seq. 1) comprises a DVD heavy chain amino acid sequence selected from the group consisting of SEQ ID NO. 897 and SEQ ID NO. 899; and a DVD light chain amino acid sequence selected from the group consisting of SEQ ID NO. 898 and SEQ ID NO. 900. In an embodiment, the binding protein capable of binding CD-3 (seq. 2) and CD-19 (seq. 1) comprises a DVD heavy chain amino acid sequence of SEQ ID NO. 897 and a DVD light chain amino acid sequence of SEQ ID NO: 898. In another embodiment, the binding protein capable of binding CD-3 (seq. 2) and CD-19 (seq. 1) has a reverse orientation and comprises a DVD heavy chain amino acid sequence of SEQ ID NO. 899 and a DVD light chain amino acid sequence of SEQ ID NO: 900. (Table 250)

[0217] In an embodiment, the binding protein capable of binding CD-3 (seq. 3) and CD-19 (seq. 1) comprises a DVD heavy chain amino acid sequence selected from the group consisting of SEQ ID NO. 901 and SEQ ID NO. 903; and a DVD light chain amino acid sequence selected from the group consisting of SEQ ID NO. 902 and SEQ ID NO. 904. In an embodiment, the binding protein capable of binding CD-3 (seq. 3) and CD-19 (seq. 1) comprises a DVD heavy chain amino acid sequence of SEQ ID NO. 901 and a DVD light chain amino acid sequence of SEQ ID NO: 902. In another embodiment, the binding protein capable of binding CD-3 (seq. 3) and CD-19 (seq. 1) has a reverse orientation and comprises a DVD heavy chain amino acid sequence of SEQ ID NO. 903 and a DVD light chain amino acid sequence of SEQ ID NO: 904. (Table 251)

[0218] In an embodiment, the binding protein capable of binding CD-3 (seq. 4) and CD-19 (seq. 2) comprises a DVD heavy chain amino acid sequence selected from the group consisting of SEQ ID NO. 905 and SEQ ID NO. 907; and a DVD light chain amino acid sequence selected from the group consisting of SEQ ID NO. 906 and SEQ ID NO. 908. In an embodiment, the binding protein capable of binding CD-3 (seq. 4) and CD-19 (seq. 2) comprises a DVD heavy chain amino acid sequence of SEQ ID NO. 905 and a DVD light chain amino acid sequence of SEQ ID NO: 906. In another embodiment, the binding protein capable of binding CD-3 (seq. 4) and CD-19 (seq. 2) has a reverse orientation and comprises a DVD heavy chain amino acid sequence of SEQ ID NO. 907 and a DVD light chain amino acid sequence of SEQ ID NO: 908. (Table 252)

[0219] In an embodiment, the binding protein capable of binding CD-3 (seq. 4) and CD-19 (seq. 3) comprises a DVD heavy chain amino acid sequence selected from the group consisting of SEQ ID NO. 909 and SEQ ID NO. 911; and a DVD light chain amino acid sequence selected from the group consisting of SEQ ID NO. 910 and SEQ ID NO. 912. In an embodiment, the binding protein capable of binding CD-3 (seq. 4) and CD-19 (seq. 3) comprises a DVD heavy chain amino acid sequence of SEQ ID NO. 909 and a DVD light chain amino acid sequence of SEQ ID NO: 910. In another embodiment, the binding protein capable of binding CD-3 (seq. 4) and CD-19 (seq. 3) has a reverse orientation and comprises a DVD heavy chain amino acid sequence of SEQ ID NO. 911 and a DVD light chain amino acid sequence of SEQ ID NO: 912. (Table 253)

[0220] In an embodiment, the binding protein capable of binding CD-3 (seq. 4) and CD-19 (seq. 1) comprises a DVD heavy chain amino acid sequence selected from the group consisting of SEQ ID NO. 913 and SEQ ID NO. 915; and a DVD light chain amino acid sequence selected from the group consisting of SEQ ID NO. 914 and SEQ ID NO. 916. In an embodiment, the binding protein capable of binding CD-3 (seq. 4) and CD-19 (seq. 1) comprises a DVD heavy chain amino acid sequence of SEQ ID NO. 913 and a DVD light chain amino acid sequence of SEQ ID NO: 914. In another embodiment, the binding protein capable of binding CD-3 (seq. 4) and CD-19 (seq. 1) has a reverse orientation and comprises a DVD heavy chain amino acid sequence of SEQ ID NO. 915 and a DVD light chain amino acid sequence of SEQ ID NO: 916. (Table 254)

[0221] In an embodiment, the binding protein capable of binding CD-3 (seq. 4) and CD-19 (seq. 1) comprises a DVD heavy chain amino acid sequence of SEQ ID NO. 917 and a DVD light chain amino acid sequence of SEQ ID NO. 918. (Table 255)

[0222] In an embodiment, the binding protein capable of binding CD-3 (seq. 2) and CD-19 (seq. 2) comprises a DVD heavy chain amino acid sequence selected from the group consisting of SEQ ID NO. 919 and SEQ ID NO. 921; and a DVD light chain amino acid sequence selected from the group consisting of SEQ ID NO. 920 and SEQ ID NO. 922. In an embodiment, the binding protein capable of binding CD-3 (seq. 2) and CD-19 (seq. 2) comprises a DVD heavy chain amino acid sequence of SEQ ID NO. 919 and a DVD light chain amino acid sequence of SEQ ID NO: 920. In another embodiment, the binding protein capable of binding CD-3 (seq. 2) and CD-19 (seq. 2) has a reverse orientation and comprises a DVD heavy chain amino acid sequence of SEQ ID NO. 921 and a DVD light chain amino acid sequence of SEQ ID NO: 922. (Table 256)

[0223] In an embodiment, the binding protein capable of binding mouse mCD-3 and mouse mCD-19 comprises a DVD heavy chain amino acid sequence selected from the group consisting of SEQ ID NO. 923 and SEQ ID NO. 925; and a DVD light chain amino acid sequence selected from the group consisting of SEQ ID NO. 924 and SEQ ID NO. 926. In an embodiment, the binding protein capable of binding mCD-3 and mCD-19 comprises a DVD heavy chain amino acid sequence of SEQ ID NO. 923 and a DVD light chain amino acid sequence of SEQ ID NO: 924. In another embodiment, the binding protein capable of binding mCD-3 and mCD-19 has a reverse orientation and comprises a DVD heavy chain amino acid sequence of SEQ ID NO. 925 and a DVD light chain amino acid sequence of SEQ ID NO: 926. (Table 257)

[0224] In another embodiment, the binding protein capable of binding mouse mCD-3 and mouse mCD-19 comprises a DVD heavy chain amino acid sequence selected from the group consisting of SEQ ID NO. 927 and SEQ ID NO. 929; and a DVD light chain amino acid sequence selected from the group consisting of SEQ ID NO. 928 and SEQ ID NO. 930. In an embodiment, the binding protein capable of binding mCD-3 and mCD-19 comprises a DVD heavy chain amino acid sequence of SEQ ID NO. 927 and a DVD light chain amino acid sequence of SEQ ID NO: 928. In another embodiment, the binding protein capable of binding mCD-3 and mCD-19 has a reverse orientation and comprises a DVD heavy chain amino acid sequence of SEQ ID NO. 929 and a DVD light chain amino acid sequence of SEQ ID NO: 930. (Table 258)

[0225] In another embodiment the invention provides a binding protein comprising a polypeptide chain, wherein said polypeptide chain comprises VD1-(X1)n-VD2-C-(X2)n, wherein; VD1 is a first heavy chain variable domain obtained from a first parent antibody or antigen binding portion thereof; VD2 is a second heavy chain variable domain obtained from a second parent antibody or antigen binding portion thereof; C is a heavy chain constant domain; (X1)n is a linker with the proviso that it is not CH1, wherein said (X1)n is either present or absent; and (X2)n is an Fc region, wherein said (X2)n is either present or absent. In an embodiment, the Fc region is absent from the binding protein.

[0226] In another embodiment, the invention provides a binding protein comprising a polypeptide chain, wherein said polypeptide chain comprises VD1-(X1)n-VD2-C-(X2)n, wherein, VD1 is a first light chain variable domain obtained from a first parent antibody or antigen binding portion thereof; VD2 is a second light chain variable domain obtained from a second parent antibody or antigen binding portion thereof; C is a light chain constant domain; (X1)n is a linker with the proviso that it is not CH1, wherein said (X1)n is either present or absent; and (X2)n does not comprise an Fc region, wherein said (X2)n is either present or absent. In an embodiment, (X2)n is absent from the binding protein.

[0227] In another embodiment the binding protein of the invention comprises first and second polypeptide chains, wherein said first polypeptide chain comprises a first VD1-(X1)n-VD2-C-(X2)n, wherein VD1 is a first heavy chain variable domain obtained from a first parent antibody or antigen binding portion thereof; VD2 is a second heavy chain variable domain obtained from a second parent antibody or antigen binding portion thereof; C is a heavy chain constant domain; (X1)n is a linker with the proviso that it is not CH1, wherein said (X1)n is either present or absent; and (X2)n is an Fc region, wherein said (X2)n is either present or absent; and wherein said second polypeptide chain comprises a second VD1-(X1)n-VD2-C-(X2)n, wherein VD1 is a first light chain variable domain obtained from a first parent antibody or antigen binding portion thereof; VD2 is a second light chain variable domain obtained from a second parent antibody or antigen binding portion thereof; C is a light chain constant domain; (X1)n is a linker with the proviso that it is not CH1, wherein said (X1)n is either present or absent; and (X2)n does not comprise an Fc region, wherein said (X2)n is either present or absent. In another embodiment, the binding protein comprises two first polypeptide chains and two second polypeptide chains. In yet another embodiment, (X2)n is absent from the second polypeptide. In still another embodiment, the Fc region, if present in the first polypeptide is selected from the group consisting of native sequence Fc region and a variant sequence Fc region. In still another embodiment, the Fc region is selected from the group consisting of an Fc region from an IgG1, IgG2, IgG3, IgG4, IgA, IgM, IgE, and IgD.

[0228] In another embodiment the binding protein of the invention is a DVD-Ig capable of binding two antigens comprising four polypeptide chains, wherein, first and third polypeptide chains comprise VD1-(X1)n-VD2-C-(X2)n, wherein, VD1 is a first heavy chain variable domain obtained from a first parent antibody or antigen binding portion thereof; VD2 is a second heavy chain variable domain obtained from a second parent antibody or antigen binding portion thereof; C is a heavy chain constant domain; (X1)n is a linker with the proviso that it is not CH1, wherein said (X1)n is either present or absent; and (X2)n is an Fc region, wherein said (X2)n is either present or absent; and wherein second and fourth polypeptide chains comprise VD1-(X1)n-VD2-C-(X2)n, wherein VD1 is a first light chain variable domain obtained from a first parent antibody or antigen binding portion thereof; VD2 is a second light chain variable domain obtained from a second parent antibody or antigen binding portion thereof; C is a light chain constant domain; (X1)n is a linker with the proviso that it is not CH1, wherein said (X1)n is either present or absent; and (X2)n does not comprise an Fc region, wherein said (X2)n is either present or absent.

[0229] The invention provides a method of making a DVD-Ig binding protein by preselecting the parent antibodies. In an embodiment, the method of making a Dual Variable Domain Immunoglobulin capable of binding two antigens comprising the steps of a) obtaining a first parent antibody or antigen binding portion thereof, capable of binding a first antigen; b) obtaining a second parent antibody or antigen binding portion thereof, capable of binding a second antigen; c) constructing first and third polypeptide chains comprising VD1-(X1)n-VD2-C-(X2)n, wherein, VD1 is a first heavy chain variable domain obtained from said first parent antibody or antigen binding portion thereof; VD2 is a second heavy chain variable domain obtained from said second parent antibody or antigen binding portion thereof; C is a heavy chain constant domain; (X1)n is a linker with the proviso that it is not CH1, wherein said (X1)n is either present or absent; and (X2)n is an Fc region, wherein said (X2)n is either present or absent; d) constructing second and fourth polypeptide chains comprising VD1-(X1)n-VD2-C-(X2)n, wherein, VD1 is a first light chain variable domain obtained from said first parent antibody or antigen binding portion thereof; VD2 is a second light chain variable domain obtained from said second parent antibody or antigen binding thereof; C is a light chain constant domain; (X1)n is a linker with the proviso that it is not CH1, wherein said (X1)n is either present or absent; and (X2)n does not comprise an Fc region, wherein said (X2)n is either present or absent; e) expressing said first, second, third and fourth polypeptide chains; such that a Dual Variable Domain Immunoglobulin capable of binding said first and said second antigen is generated.

[0230] In still another embodiment, the invention provides a method of generating a Dual Variable Domain Immunoglobulin capable of binding two antigens with desired properties comprising the steps of a) obtaining a first parent antibody or antigen binding portion thereof, capable of binding a first antigen and possessing at least one desired property exhibited by the Dual Variable Domain Immunoglobulin; b) obtaining a second parent antibody or antigen binding portion thereof, capable of binding a second antigen and possessing at least one desired property exhibited by the Dual Variable Domain Immunoglobulin; c) constructing first and third polypeptide chains comprising VD1-(X1)n-VD2-C-(X2)n, wherein; VD1 is a first heavy chain variable domain obtained from said first parent antibody or antigen binding portion thereof; VD2 is a second heavy chain variable domain obtained from said second parent antibody or antigen binding portion thereof; C is a heavy chain constant domain; (X1)n is a linker with the proviso that it is not CH1, wherein said (X1)n is either present or absent; and (X2)n is an Fc region, wherein said (X2)n is either present or absent; d) constructing second and fourth polypeptide chains comprising VD1-(X1)n-VD2-C-(X2)n, wherein; VD1 is a first light chain variable domain obtained from said first parent antibody or antigen binding portion thereof; VD2 is a second light chain variable domain obtained from said second parent antibody or antigen binding portion thereof; C is a light chain constant domain; (X1)n is a linker with the proviso that it is not CH1, wherein said (X1)n is either present or absent; and (X2)n does not comprise an Fc region, wherein said (X2)n is either present or absent; e) expressing said first, second, third and fourth polypeptide chains; such that a Dual Variable Domain Immunoglobulin capable of binding said first and said second antigen with desired properties is generated.

[0231] In one embodiment, the VD1 of the first and second polypeptide chains disclosed herein are obtained from the same parent antibody or antigen binding portion thereof. In another embodiment, the VD1 of the first and second polypeptide chains disclosed herein are obtained from different parent antibodies or antigen binding portions thereof. In another embodiment, the VD2 of the first and second polypeptide chains disclosed herein are obtained from the same parent antibody or antigen binding portion thereof. In another embodiment, the VD2 of the first and second polypeptide chains disclosed herein are obtained from different parent antibodies or antigen binding portions thereof.

[0232] In one embodiment the first parent antibody or antigen binding portion thereof, and the second parent antibody or antigen binding portion thereof, are the same antibody. In another embodiment the first parent antibody or antigen binding portion thereof, and the second parent antibody or antigen binding portion thereof, are different antibodies.

[0233] In one embodiment the first parent antibody or antigen binding portion thereof, binds a first antigen and the second parent antibody or antigen binding portion thereof, binds a second antigen. In a particular embodiment, the first and second antigens are the same antigen. In another embodiment, the parent antibodies bind different epitopes on the same antigen. In another embodiment the first and second antigens are different antigens. In another embodiment, the first parent antibody or antigen binding portion thereof, binds the first antigen with a potency different from the potency with which the second parent antibody or antigen binding portion thereof, binds the second antigen. In yet another embodiment, the first parent antibody or antigen binding portion thereof, binds the first antigen with an affinity different from the affinity with which the second parent antibody or antigen binding portion thereof, binds the second antigen.

[0234] In another embodiment the first parent antibody or antigen binding portion thereof, and the second parent antibody or antigen binding portion thereof, are selected from the group consisting of, human antibody, CDR grafted antibody, and humanized antibody. In an embodiment, the antigen binding portions are selected from the group consisting of a Fab fragment, a F(ab′)₂ fragment, a bivalent fragment comprising two Fab fragments linked by a disulfide bridge at the hinge region; a Fd fragment consisting of the VH and CH1 domains; a Fv fragment consisting of the VL and VH domains of a single arm of an antibody, a dAb fragment, an isolated complementarity determining region (CDR), a single chain antibody, and diabodies.

[0235] In another embodiment the binding protein of the invention possesses at least one desired property exhibited by the first parent antibody or antigen binding portion thereof, or the second parent antibody or antigen binding portion thereof. Alternatively, the first parent antibody or antigen binding portion thereof and the second parent antibody or antigen binding portion thereof possess at least one desired property exhibited by the Dual Variable Domain Immunoglobulin. In an embodiment, the desired property is selected from one or more antibody parameters. In another embodiment, the antibody parameters are selected from the group consisting of antigen specificity, affinity to antigen, potency, biological function, epitope recognition, stability, solubility, production efficiency, immunogenicity, pharmacokinetics, bioavailability, tissue cross reactivity, and orthologous antigen binding. In an embodiment the binding protein is multivalent. In another embodiment, the binding protein is multispecific. The multivalent and or multispecific binding proteins described herein have desirable properties particularly from a therapeutic standpoint. For instance, the multivalent and or multispecific binding protein may (1) be internalized (and/or catabolized) faster than a bivalent antibody by a cell expressing an antigen to which the antibodies bind; (2) be an agonist antibody; and/or (3) induce cell death and/or apoptosis of a cell expressing an antigen which the multivalent antibody is capable of binding to. The “parent antibody” which provides at least one antigen binding specificity of the multivalent and or multispecific binding proteins may be one which is internalized (and/or catabolized) by a cell expressing an antigen to which the antibody binds; and/or may be an agonist, cell death-inducing, and/or apoptosis-inducing antibody, and the multivalent and or multispecific binding protein as described herein may display improvement(s) in one or more of these properties. Moreover, the parent antibody may lack any one or more of these properties, but may be endowed with them when constructed as a multivalent binding protein as described herein.

[0236] In another embodiment the binding protein of the invention has an on rate constant (Kon) to one or more targets selected from the group consisting of: at least about 10²M⁻¹s⁻¹; at least about 10³M⁻¹s⁻¹; at least about 10⁴M⁻¹s⁻¹; at least about 10⁵M⁻¹s⁻¹; and at least about 10⁶M⁻¹s⁻¹, as measured by surface plasmon resonance. In an embodiment, the binding protein of the invention has an on rate constant (Kon) to one or more targets between 10²M⁻¹s⁻¹ and 10³M⁻¹s⁻¹; between 10³M⁻¹s⁻¹ and 10⁴M⁻¹s⁻¹; between 10⁴M⁻¹s⁻¹ and 10⁵M⁻¹s⁻¹; or between 10⁵M⁻¹s⁻¹ and 10⁶M⁻¹s⁻¹, as measured by surface plasmon resonance.

[0237] In another embodiment the binding protein has an off rate constant (Koff) for one or more targets selected from the group consisting of: at most about 10⁻³ s⁻¹; at most about 10⁻⁴ s⁻¹; at most about 10⁻⁵ s⁻¹; and at most about 10⁻⁶ s⁻¹, as measured by surface plasmon resonance. In an embodiment, the binding protein of the invention has an off rate constant (Koff) to one or more targets of 10⁻³ s⁻¹ to 10⁻⁴ s⁻¹; of 10⁻⁴ s⁻¹ to 10⁻⁵ s⁻¹; or of 10⁻⁵ s⁻¹ to 10⁻⁶ s⁻¹, as measured by surface plasmon resonance.

[0238] In another embodiment the binding protein has a dissociation constant (K_{D}) to one or more targets selected from the group consisting of: at most about 10⁻⁷ M; at most about 10⁻⁸ M; at M; most about 10⁻⁹ M; at most about 10⁻¹⁰ M; at most about 10⁻¹¹ M; at most about 10⁻¹² M; and at most 10⁻¹³M. In an embodiment, the binding protein of the invention has a dissociation constant M; (K_{D}) to its targets of 10⁻⁷ M to 10⁻⁸ M; of 10⁻⁸ M to 10⁻⁹ M; of 10⁻⁹ M to 10⁻¹⁰ M; of 10⁻¹⁰ to 10⁻¹¹ M; of 10⁻¹¹ M to 10⁻¹² M; or of 10⁻¹² M to 10⁻¹³M.

[0239] In another embodiment, the binding protein described herein is a conjugate further comprising an agent selected from the group consisting of an immunoadhesion molecule, an imaging agent, a therapeutic agent, and a cytotoxic agent. In an embodiment, the imaging agent is selected from the group consisting of a radiolabel, an enzyme, a fluorescent label, a luminescent label, a bioluminescent label, a magnetic label, and biotin. In another embodiment, the imaging agent is a radiolabel selected from the group consisting of: ³H, ¹⁴C, ³⁵S, ⁹⁰Y, ⁹⁹Tc, ¹¹¹In, ¹²⁵I, ¹³¹I, ¹⁷⁷Lu, ¹⁶⁶Ho, and ¹⁵³Sm. In yet another embodiment, the therapeutic or cytotoxic agent is selected from the group consisting of an anti-metabolite, an alkylating agent, an antibiotic, a growth factor, a cytokine, an anti-angiogenic agent, an anti-mitotic agent, an anthracycline, toxin, and an apoptotic agent.

[0240] In another embodiment, the binding protein described herein is a crystallized binding protein and exists as a crystal. In an embodiment, the crystal is a carrier-free pharmaceutical controlled release crystal. In yet another embodiment, the crystallized binding protein has a greater half life in vivo than the soluble counterpart of said binding protein. In still another embodiment, the crystallized binding protein retains biological activity.

[0241] In another embodiment, the binding protein described herein is glycosylated. For example, the glycosylation is a human glycosylation pattern.

[0242] One aspect of the invention pertains to an isolated nucleic acid encoding any one of the binding proteins disclosed herein. A further embodiment provides a vector comprising the isolated nucleic acid disclosed herein wherein said vector is selected from the group consisting of pcDNA; pTT (Durocher et al., Nucleic Acids Research 2002, Vol 30, No. 2); pTT3 (pTT with additional multiple cloning site; pEFBOS (Mizushima, S, and Nagata, S., (1990) Nucleic acids Research Vol 18, No. 17); pBV; pJV; pcDNA3.1 TOPO, pEF6 TOPO and pBJ. In an embodiment, the vector is a vector disclosed in U.S. Patent Application Ser. No. 61/021,282.

[0243] In another aspect a host cell is transformed with the vector disclosed herein. In an embodiment, the host cell is a prokaryotic cell. In another embodiment, the host cell is E. Coli. In a related embodiment the host cell is a eukaryotic cell. In another embodiment, the eukaryotic cell is selected from the group consisting of protist cell, animal cell, plant cell and fungal cell. In yet another embodiment, the host cell is a mammalian cell including, but not limited to, CHO, COS; NSO, SP2, PER.C6 or a fungal cell such as Saccharomyces cerevisiae; or an insect cell such as Sf9.

[0244] In an embodiment, two or more DVD-Igs, e.g., with different specificities, are produced in a single recombinant host cell. For example, the expression of a mixture of antibodies has been called Oligoclonics™, (Merus B. V., The Netherlands) U.S. Pat. Nos. 7,262,028; 7,429,486.

[0245] Another aspect of the invention provides a method of producing a binding protein disclosed herein comprising culturing any one of the host cells also disclosed herein in a culture medium under conditions sufficient to produce the binding protein. In an embodiment, 50%-75% of the binding protein produced by this method is a dual specific tetravalent binding protein. In a particular embodiment, 75%-90% of the binding protein produced by this method is a dual specific tetravalent binding protein. In a particular embodiment, 90%-95% of the binding protein produced is a dual specific tetravalent binding protein.

[0246] One embodiment provides a composition for the release of a binding protein wherein the composition comprises a formulation that in turn comprises a crystallized binding protein, as disclosed herein, and an ingredient, and at least one polymeric carrier. For example, the polymeric carrier is a polymer selected from one or more of the group consisting of: poly (acrylic acid), poly (cyanoacrylates), poly (amino acids), poly (anhydrides), poly (depsipeptide), poly (esters), poly (lactic acid), poly (lactic-co-glycolic acid) or PLGA, poly (b-hydroxybutryate), poly (caprolactone), poly (dioxanone); poly (ethylene glycol), poly ((hydroxypropyl) methacrylamide, poly [(organo)phosphazene], poly (ortho esters), poly (vinyl alcohol), poly (vinylpyrrolidone), maleic anhydride-alkyl vinyl ether copolymers, pluronic polyols, albumin, alginate, cellulose and cellulose derivatives, collagen, fibrin, gelatin, hyaluronic acid, oligosaccharides, glycaminoglycans, sulfated polysaccharides, blends and copolymers thereof. For example, the ingredient is selected from the group consisting of albumin, sucrose, trehalose, lactitol, gelatin, hydroxypropyl-β-cyclodextrin, methoxypolyethylene glycol and polyethylene glycol. Another embodiment provides a method for treating a mammal comprising the step of administering to the mammal an effective amount of the composition disclosed herein.

[0247] The invention also provides a pharmaceutical composition comprising a binding protein, as disclosed herein and a pharmaceutically acceptable carrier. In a further embodiment the pharmaceutical composition comprises at least one additional therapeutic agent for treating a disorder. For example, the additional agent is selected from the group consisting of: a therapeutic agent, an imaging agent, a cytotoxic agent, an angiogenesis inhibitor (including but not limited to an anti-VEGF antibody or a VEGF-trap), a kinase inhibitor (including but not limited to a KDR and a TIE-2 inhibitor), a co-stimulation molecule blocker (including but not limited to anti-B7.1, anti-B7.2, CTLA4-Ig, anti-CD20), an adhesion molecule blocker (including but not limited to an anti-LFA-1 antibody, an anti-E/L selectin antibody, a small molecule inhibitor), an anti-cytokine antibody or functional fragment thereof (including but not limited to an anti-IL-18, an anti-TNF, and an anti-IL-6/cytokine receptor antibody), methotrexate, cyclosporin, rapamycin, FK506, a detectable label or reporter, a TNF antagonist, an antirheumatic, a muscle relaxant, a narcotic, a non-steroid anti-inflammatory drug (NSAID), an analgesic, an anesthetic, a sedative, a local anesthetic, a neuromuscular blocker, an antimicrobial, an antipsoriatic, a corticosteriod, an anabolic steroid, an erythropoietin, an immunization, an immunoglobulin, an immunosuppressive, a growth hormone, a hormone replacement drug, a radiopharmaceutical, an antidepressant, an antipsychotic, a stimulant, an asthma medication, a beta agonist, an inhaled steroid, an epinephrine or analog, a cytokine, and a cytokine antagonist.

[0248] In another aspect, the invention provides a method for treating a human subject suffering from a disorder in which the target, or targets, capable of being bound by the binding protein disclosed herein is detrimental, comprising administering to the human subject a binding protein disclosed herein such that the activity of the target, or targets in the human subject is inhibited and one of more symptoms is alleviated or treatment is achieved. For example, the disorder is selected from the group comprising arthritis, osteoarthritis, juvenile chronic arthritis, septic arthritis, Lyme arthritis, psoriatic arthritis, reactive arthritis, spondyloarthropathy, systemic lupus erythematosus, Crohn's disease, ulcerative colitis, inflammatory bowel disease, insulin dependent diabetes mellitus, thyroiditis, asthma, allergic diseases, psoriasis, dermatitis scleroderma, graft versus host disease, organ transplant rejection, acute or chronic immune disease associated with organ transplantation, sarcoidosis, atherosclerosis, disseminated intravascular coagulation, Kawasaki's disease, Grave's disease, nephrotic syndrome, chronic fatigue syndrome, Wegener's granulomatosis, Henoch-Schoenlein purpurea, microscopic vasculitis of the kidneys, chronic active hepatitis, uveitis, septic shock, toxic shock syndrome, sepsis syndrome, cachexia, infectious diseases, parasitic diseases, acquired immunodeficiency syndrome, acute transverse myelitis, Huntington's chorea, Parkinson's disease, Alzheimer's disease, stroke, primary biliary cirrhosis, hemolytic anemia, malignancies, heart failure, myocardial infarction, Addison's disease, sporadic polyglandular deficiency type I and polyglandular deficiency type II, Schmidt's syndrome, adult (acute) respiratory distress syndrome, alopecia, alopecia greata, seronegative arthopathy, arthropathy, Reiter's disease, psoriatic arthropathy, ulcerative colitic arthropathy, enteropathic synovitis, chlamydia, yersinia and salmonella associated arthropathy, spondyloarthopathy, atheromatous disease/arteriosclerosis, atopic allergy, autoimmune bullous disease, pemphigus vulgaris, pemphigus foliaceus, pemphigoid, linear IgA disease, autoimmune haemolytic anaemia, Coombs positive haemolytic anaemia, acquired pernicious anaemia, juvenile pernicious anaemia, myalgic encephalitis/Royal Free Disease, chronic mucocutaneous candidiasis, giant cell arteritis, primary sclerosing hepatitis, cryptogenic autoimmune hepatitis, Acquired Immunodeficiency Disease Syndrome, Acquired Immunodeficiency Related Diseases, Hepatitis B, Hepatitis C, common varied immunodeficiency (common variable hypogammaglobulinaemia), dilated cardiomyopathy, female infertility, ovarian failure, premature ovarian failure, fibrotic lung disease, cryptogenic fibrosing alveolitis, post-inflammatory interstitial lung disease, interstitial pneumonitis, connective tissue disease associated interstitial lung disease, mixed connective tissue disease associated lung disease, systemic sclerosis associated interstitial lung disease, rheumatoid arthritis associated interstitial lung disease, systemic lupus erythematosus associated lung disease, dermatomyositis/polymyositis associated lung disease, Sjögren's disease associated lung disease, ankylosing spondylitis associated lung disease, vasculitic diffuse lung disease, haemosiderosis associated lung disease, drug-induced interstitial lung disease, fibrosis, radiation fibrosis, bronchiolitis obliterans, chronic eosinophilic pneumonia, lymphocytic infiltrative lung disease, postinfectious interstitial lung disease, gouty arthritis, autoimmune hepatitis, type-1 autoimmune hepatitis (classical autoimmune or lupoid hepatitis), type-2 autoimmune hepatitis (anti-LKM antibody hepatitis), autoimmune mediated hypoglycaemia, type B insulin resistance with acanthosis nigricans, hypoparathyroidism, acute immune disease associated with organ transplantation, chronic immune disease associated with organ transplantation, osteoarthrosis, primary sclerosing cholangitis, psoriasis type 1, psoriasis type 2, idiopathic leucopaenia, autoimmune neutropaenia, renal disease NOS, glomerulonephritides, microscopic vasulitis of the kidneys, lyme disease, discoid lupus erythematosus, male infertility idiopathic or NOS, sperm autoimmunity, multiple sclerosis (all subtypes), sympathetic ophthalmia, pulmonary hypertension secondary to connective tissue disease, Goodpasture's syndrome, pulmonary manifestation of polyarteritis nodosa, acute rheumatic fever, rheumatoid spondylitis, Still's disease, systemic sclerosis, Sjögren's syndrome, Takayasu's disease/arteritis, autoimmune thrombocytopaenia, idiopathic thrombocytopaenia, autoimmune thyroid disease, hyperthyroidism, goitrous autoimmune hypothyroidism (Hashimoto's disease), atrophic autoimmune hypothyroidism, primary myxoedema, phacogenic uveitis, primary vasculitis, vitiligo acute liver disease, chronic liver diseases, alcoholic cirrhosis, alcohol-induced liver injury, choleosatatis, idiosyncratic liver disease, Drug-Induced hepatitis, Non-alcoholic Steatohepatitis, allergy and asthma, group B streptococci (GBS) infection, mental disorders (e.g., depression and schizophrenia), Th2 Type and Th1 Type mediated diseases, acute and chronic pain (different forms of pain), and cancers such as lung, breast, stomach, bladder, colon, pancreas, ovarian, prostate and rectal cancer and hematopoietic malignancies (leukemia and lymphoma), Abetalipoprotemia, Acrocyanosis, acute and chronic parasitic or infectious processes, acute leukemia, acute lymphoblastic leukemia (ALL), acute myeloid leukemia (AML), acute or chronic bacterial infection, acute pancreatitis, acute renal failure, adenocarcinomas, aerial ectopic beats, AIDS dementia complex, alcohol-induced hepatitis, allergic conjunctivitis, allergic contact dermatitis, allergic rhinitis, allograft rejection, alpha-1-antitrypsin deficiency, amyotrophic lateral sclerosis, anemia, angina pectoris, anterior horn cell degeneration, anti cd3 therapy, antiphospholipid syndrome, anti-receptor hypersensitivity reactions, aortic and peripheral aneuryisms, aortic dissection, arterial hypertension, arteriosclerosis, arteriovenous fistula, ataxia, atrial fibrillation (sustained or paroxysmal), atrial flutter, atrioventricular block, B cell lymphoma, bone graft rejection, bone marrow transplant (BMT) rejection, bundle branch block, Burkitt's lymphoma, Burns, cardiac arrhythmias, cardiac stun syndrome, cardiac tumors, cardiomyopathy, cardiopulmonary bypass inflammation response, cartilage transplant rejection, cerebellar cortical degenerations, cerebellar disorders, chaotic or multifocal atrial tachycardia, chemotherapy associated disorders, chronic myelocytic leukemia (CML), chronic alcoholism, chronic inflammatory pathologies, chronic lymphocytic leukemia (CLL), chronic obstructive pulmonary disease (COPD), chronic salicylate intoxication, colorectal carcinoma, congestive heart failure, conjunctivitis, contact dermatitis, corpulmonale, coronary artery disease, Creutzfeldt-Jakob disease, culture negative sepsis, cystic fibrosis, cytokine therapy associated disorders, Dementia pugilistica, demyelinating diseases, dengue hemorrhagic fever, dermatitis, dermatologic conditions, diabetes, diabetes mellitus, diabetic ateriosclerotic disease, Diffuse Lewy body disease, dilated congestive cardiomyopathy, disorders of the basal ganglia, Down's Syndrome in middle age, drug-induced movement disorders induced by drugs which block CNS dopamine receptors, drug sensitivity, eczema, encephalomyelitis, endocarditis, endocrinopathy, epiglottitis, epstein-barr virus infection, erythromelalgia, extrapyramidal and cerebellar disorders, familial hematophagocytic lymphohistiocytosis, fetal thymus implant rejection, Friedreich's ataxia, functional peripheral arterial disorders, fungal sepsis, gas gangrene, gastric ulcer, glomerular nephritis, graft rejection of any organ or tissue, gram negative sepsis, gram positive sepsis, granulomas due to intracellular organisms, hairy cell leukemia, Hallerrorden-Spatz disease, hashimoto's thyroiditis, hay fever, heart transplant rejection, hemachromatosis, hemodialysis, hemolytic uremic syndrome/thrombolytic thrombocytopenic purpura, hemorrhage, hepatitis (A), His bundle arrythmias, HIV infection/HIV neuropathy, Hodgkin's disease, hyperkinetic movement disorders, hypersensitity reactions, hypersensitivity pneumonitis, hypertension, hypokinetic movement disorders, hypothalamic-pituitary-adrenal axis evaluation, idiopathic Addison's disease, idiopathic pulmonary fibrosis, antibody mediated cytotoxicity, Asthenia, infantile spinal muscular atrophy, inflammation of the aorta, influenza a, ionizing radiation exposure, iridocyclitis/uveitis/optic neuritis, ischemia-reperfusion injury, ischemic stroke, juvenile rheumatoid arthritis, juvenile spinal muscular atrophy, Kaposi's sarcoma, kidney transplant rejection, legionella, leishmaniasis, leprosy, lesions of the corticospinal system, lipedema, liver transplant rejection, lymphederma, malaria, malignamt Lymphoma, malignant histiocytosis, malignant melanoma, meningitis, meningococcemia, metabolic/idiopathic diseases, migraine headache, mitochondrial multi.system disorder, mixed connective tissue disease, monoclonal gammopathy, multiple myeloma, multiple systems degenerations (Mencel Dejerine-Thomas Shi-Drager and Machado-Joseph), myasthenia gravis, mycobacterium avium intracellulare, mycobacterium tuberculosis, myelodyplastic syndrome, myocardial infarction, myocardial ischemic disorders, nasopharyngeal carcinoma, neonatal chronic lung disease, nephritis, nephrosis, neurodegenerative diseases, neurogenic I muscular atrophies, neutropenic fever, non-hodgkins lymphoma, occlusion of the abdominal aorta and its branches, occlusive arterial disorders, okt3 therapy, orchitis/epidydimitis, orchitis/vasectomy reversal procedures, organomegaly, osteoporosis, pancreas transplant rejection, pancreatic carcinoma, paraneoplastic syndrome/hypercalcemia of malignancy, parathyroid transplant rejection, pelvic inflammatory disease, perennial rhinitis, pericardial disease, peripheral atherlosclerotic disease, peripheral vascular disorders, peritonitis, pernicious anemia, pneumocystis carinii pneumonia, pneumonia, POEMS syndrome (polyneuropathy, organomegaly, endocrinopathy, monoclonal gammopathy, and skin changes syndrome), post perfusion syndrome, post pump syndrome, post-MI cardiotomy syndrome, preeclampsia, Progressive supranucleo Palsy, primary pulmonary hypertension, radiation therapy, Raynaud's phenomenon and disease, Raynoud's disease, Refsum's disease, regular narrow QRS tachycardia, renovascular hypertension, reperfusion injury, restrictive cardiomyopathy, sarcomas, scleroderma, senile chorea, Senile Dementia of Lewy body type, seronegative arthropathies, shock, sickle cell anemia, skin allograft rejection, skin changes syndrome, small bowel transplant rejection, solid tumors, specific arrythmias, spinal ataxia, spinocerebellar degenerations, streptococcal myositis, structural lesions of the cerebellum, Subacute sclerosing panencephalitis, Syncope, syphilis of the cardiovascular system, systemic anaphalaxis, systemic inflammatory response syndrome, systemic onset juvenile rheumatoid arthritis, T-cell or FAB ALL, Telangiectasia, thromboangitis obliterans, thrombocytopenia, toxicity, transplants, trauma/hemorrhage, type III hypersensitivity reactions, type IV hypersensitivity, unstable angina, uremia, urosepsis, urticaria, valvular heart diseases, varicose veins, vasculitis, venous diseases, venous thrombosis, ventricular fibrillation, viral and fungal infections, vital encephalitis/aseptic meningitis, vital-associated hemaphagocytic syndrome, Wernicke-Korsakoff syndrome, Wilson's disease, xenograft rejection of any organ or tissue, acute coronary syndromes, acute idiopathic polyneuritis, acute inflammatory demyelinating polyradiculoneuropathy, acute ischemia, adult Still's disease, alopecia greata, anaphylaxis, anti-phospholipid antibody syndrome, aplastic anemia, arteriosclerosis, atopic eczema, atopic dermatitis, autoimmune dermatitis, autoimmune disorder associated with streptococcus infection, autoimmune enteropathy, autoimmune hearing loss, autoimmune lymphoproliferative syndrome (ALPS), autoimmune myocarditis, autoimmune premature ovarian failure, blepharitis, bronchiectasis, bullous pemphigoid, cardiovascular disease, catastrophic antiphospholipid syndrome, celiac disease, cervical spondylosis, chronic ischemia, cicatricial pemphigoid, clinically isolated syndrome (cis) with risk for multiple sclerosis, conjunctivitis, childhood onset psychiatric disorder, chronic obstructive pulmonary disease (COPD), dacryocystitis, dermatomyositis, diabetic retinopathy, diabetes mellitus, disk herniation, disk prolaps, drug induced immune hemolytic anemia, endocarditis, endometriosis, endophthalmitis, episcleritis, erythema multiforme, erythema multiforme major, gestational pemphigoid, Guillain-Barré syndrome (GBS), hay fever, Hughes syndrome, idiopathic Parkinson's disease, idiopathic interstitial pneumonia, IgE-mediated allergy, immune hemolytic anemia, inclusion body myositis, infectious ocular inflammatory disease, inflammatory demyelinating disease, inflammatory heart disease, inflammatory kidney disease, IPF/UIP, iritis, keratitis, keratojuntivitis sicca, Kussmaul disease or Kussmaul-Meier disease, Landry's paralysis, Langerhan's cell histiocytosis, livedo reticularis, macular degeneration, microscopic polyangiitis, morbus bechterev, motor neuron disorders, mucous membrane pemphigoid, multiple organ failure, myasthenia gravis, myelodysplastic syndrome, myocarditis, nerve root disorders, neuropathy, non-A non-B hepatitis, optic neuritis, osteolysis, ovarian cancer, pauciarticular JRA, peripheral artery occlusive disease (PAOD), peripheral vascular disease (PVD), peripheral artery, disease (PAD), phlebitis, polyarteritis nodosa (or periarteritis nodosa), polychondritis, polymyalgia rheumatica, poliosis, polyarticular JRA, polyendocrine deficiency syndrome, polymyositis, polymyalgia rheumatica (PMR), post-pump syndrome, primary Parkinsonism, prostate and rectal cancer and hematopoietic malignancies (leukemia and lymphoma), prostatitis, pure red cell aplasia, primary adrenal insufficiency, recurrent neuromyelitis optica, restenosis, rheumatic heart disease, sapho (synovitis, acne, pustulosis, hyperostosis, and osteitis), scleroderma, secondary amyloidosis, shock lung, scleritis, sciatica, secondary adrenal insufficiency, silicone associated connective tissue disease, sneddon-wilkinson dermatosis, spondilitis ankylosans, Stevens-Johnson syndrome (SJS), systemic inflammatory response syndrome, temporal arteritis, toxoplasmic retinitis, toxic epidermal necrolysis, transverse myelitis, TRAPS (tumor necrosis factor receptor, type 1 allergic reaction, type II diabetes, urticaria, usual interstitial pneumonia (UIP), vasculitis, vernal conjunctivitis, viral retinitis, Vogt-Koyanagi-Harada syndrome (VKH syndrome), wet macular degeneration, wound healing, yersinia and salmonella associated arthropathy.

[0249] In an embodiment, diseases that can be treated or diagnosed with the compositions and methods of the invention include, but are not limited to, primary and metastatic cancers, including carcinomas of breast, colon, rectum, lung, oropharynx, hypopharynx, esophagus, stomach, pancreas, liver, gallbladder and bile ducts, small intestine, urinary tract (including kidney, bladder and urothelium), female genital tract (including cervix, uterus, and ovaries as well as choriocarcinoma and gestational trophoblastic disease), male genital tract (including prostate, seminal vesicles, testes and germ cell tumors), endocrine glands (including the thyroid, adrenal, and pituitary glands), and skin, as well as hemangiomas, melanomas, sarcomas (including those arising from bone and soft tissues as well as Kaposi's sarcoma), tumors of the brain, nerves, eyes, and meninges (including astrocytomas, gliomas, glioblastomas, retinoblastomas, neuromas, neuroblastomas, Schwannomas, and meningiomas), solid tumors arising from hematopoietic malignancies such as leukemias, and lymphomas (both Hodgkin's and non-Hodgkin's lymphomas).

[0250] In an embodiment, the antibodies of the invention or antigen-binding portions thereof, are used to treat cancer or in the prevention of metastases from the tumors described herein either when used alone or in combination with radiotherapy and/or other chemotherapeutic agents.

[0251] In another aspect the invention provides a method of treating a patient suffering from a disorder comprising the step of administering any one of the binding proteins disclosed herein before, concurrent, or after the administration of a second agent, as discussed herein. In a particular embodiment the second agent is selected from the group consisting of budenoside, epidermal growth factor, corticosteroids, cyclosporin, sulfasalazine, aminosalicylates, 6-mercaptopurine, azathioprine, metronidazole, lipoxygenase inhibitors, mesalamine, olsalazine, balsalazide, antioxidants, thromboxane inhibitors, IL-1 receptor antagonists, anti-IL-1β mAbs, anti-IL-6 or IL-6 receptor mAbs, growth factors, elastase inhibitors, pyridinyl-imidazole compounds, antibodies or agonists of TNF, LT, IL-1, IL-2, IL-6, IL-7, IL-8, IL-12, IL-13, IL-15, IL-16, IL-18, IL-23, EMAP-II, GM-CSF, FGF, and PDGF, antibodies of CD2, CD3, CD4, CD8, CD-19, CD25, CD28, CD30, CD40, CD45, CD69, CD90 or their ligands, methotrexate, cyclosporin, FK506, rapamycin, mycophenolate mofetil, leflunomide, NSAIDs, ibuprofen, corticosteroids, prednisolone, phosphodiesterase inhibitors, adensosine agonists, antithrombotic agents, complement inhibitors, adrenergic agents, IRAK, NIK, IKK, p38, MAP kinase inhibitors, IL-1β converting enzyme inhibitors, TNFα converting enzyme inhibitors, T-cell signalling inhibitors, metalloproteinase inhibitors, sulfasalazine, azathioprine, 6-mercaptopurines, angiotensin converting enzyme inhibitors, soluble cytokine receptors, soluble p55 TNF receptor, soluble p75 TNF receptor, sIL-1RI, sIL-1RII, sIL-6R, antiinflammatory cytokines, IL-4, IL-10, IL-11, IL-13 and TGFβ.

[0252] In a particular embodiment the pharmaceutical compositions disclosed herein are administered to the patient by at least one mode selected from parenteral, subcutaneous, intramuscular, intravenous, intrarticular, intrabronchial, intraabdominal, intracapsular, intracartilaginous, intracavitary, intracelial, intracerebellar, intracerebroventricular, intracolic, intracervical, intragastric, intrahepatic, intramyocardial, intraosteal, intrapelvic, intrapericardiac, intraperitoneal, intrapleural, intraprostatic, intrapulmonary, intrarectal, intrarenal, intraretinal, intraspinal, intrasynovial, intrathoracic, intrauterine, intravesical, bolus, vaginal, rectal, buccal, sublingual, intranasal, and transdermal.

[0253] One aspect of the invention provides at least one anti-idiotype antibody to at least one binding protein of the present invention. The anti-idiotype antibody includes any protein or peptide containing molecule that comprises at least a portion of an immunoglobulin molecule such as, but not limited to, at least one complementarily determining region (CDR) of a heavy or light chain or a ligand binding portion thereof, a heavy chain or light chain variable region, a heavy chain or light chain constant region, a framework region, or any portion thereof, that can be incorporated into a binding protein of the present invention.

77. A method for improving a characteristic of the binding protein of claim 6, the method comprising the steps of:

[0254] (a) determining the characteristic of the binding protein prior to alteration;

[0255] (a) altering the length and/or sequence of (X1)₁ of the heavy and/or light chain thereby providing an altered heavy and/or light chain;

[0256] (b) determining the improved characteristic of the altered binding protein comprising the altered heavy and light chains.

78. A method for improving a characteristic of the binding protein of claim 6, the method comprising the steps of:

[0257] (a) determining the characteristic of the binding protein prior to alteration;

[0258] (b) altering the first and second polypeptide chains such that VD1-(X1)n-VD2-C-(X2)n is changed to VD2-(X1)n-VD1-C-(X2)n, thereby providing altered heavy and light chains;

[0259] (c) determining the improved characteristic of the altered binding protein comprising the altered heavy and light chains.

In another aspect, the invention provides a method for improving a characteristic of the binding protein of claim 6, the method comprising the steps of: (a) determining the characteristic of the binding protein prior to alteration; (b) altering the first and/or second polypeptide chains such that the sequence of only one of the VD1 or VD2 of the heavy and/or light chain is changed; and (c) determining the characteristic of the altered binding protein comprising the altered heavy and light chains. In an embodiment, the characteristic is selected from the group consisting of binding to target antigen, expression yield from host cell, in vitro halflife, in vivo halflife, stability, solubility, and improved effector function. In another embodiment, the length of the (X1)₁ of the altered heavy chain is increased. In another embodiment, the length of the (X1)₁ of the altered heavy chain is decreased. In another embodiment, the length of the (X1)₁ of the altered light chain is increased. In another embodiment, the length of the (X1)₁ of the altered light chain is decreased. In another embodiment, the (X1)₁ of the altered heavy chain comprises an amino acid selected from the group consisting of SEQ ID NO:21 or 22. In another embodiment, the (X1)₁ of the altered light chain comprises an amino acid selected from the group consisting of SEQ ID NO:13 or 14. In another embodiment, the (X1)₁ of the altered heavy chain is SEQ ID NO:22 and the (X1)1 of the altered light chain is SEQ ID NO:14. In another embodiment, the (X1)₁ of the altered heavy chain is SEQ ID NO:21 and the (X1)1 of the altered light chain is SEQ ID NO:14. In another embodiment, In another embodiment, the (X1)₁ of the altered heavy chain is SEQ ID NO:22 and the (X1)1 of the altered light chain is SEQ ID NO:13. In another embodiment, the (X1)₁ of the altered heavy chain is SEQ ID NO:21 and the (X1)1 of the altered light chain is SEQ ID NO:13.

### BRIEF DESCRIPTION OF THE DRAWINGS

[0260] FIG. 1A is a schematic representation of Dual Variable Domain (DVD)-Ig constructs and shows the strategy for generation of a DVD-Ig from two parent antibodies;

[0261] FIG. 1B, is a schematic representation of constructs DVD1-Ig, DVD2-Ig, and two chimeric mono-specific antibodies from hybridoma clones 2D13.E3 (anti-IL-1α) and 13F5.G5 (anti-IL-1β).

### DETAILED DESCRIPTION OF THE INVENTION

[0262] This invention pertains to multivalent and/or multispecific binding proteins capable of binding two or more antigens. Specifically, the invention relates to dual variable domain immunoglobulins (DVD-Ig), and pharmaceutical compositions thereof, as well as nucleic acids, recombinant expression vectors and host cells for making such DVD-Igs. Methods of using the DVD-Igs of the invention to detect specific antigens, either in vitro or in vivo are also encompassed by the invention.

[0263] Unless otherwise defined herein, scientific and technical terms used in connection with the present invention shall have the meanings that are commonly understood by those of ordinary skill in the art. The meaning and scope of the terms should be clear, however, in the event of any latent ambiguity, definitions provided herein take precedent over any dictionary or extrinsic definition. Further, unless otherwise required by context, singular terms shall include pluralities and plural terms shall include the singular. In this application, the use of “or” means “and/or” unless stated otherwise. Furthermore, the use of the term “including”, as well as other forms, such as “includes” and “included”, is not limiting. Also, terms such as “element” or “component” encompass both elements and components comprising one unit and elements and components that comprise more than one subunit unless specifically stated otherwise.

[0264] Generally, nomenclatures used in connection with, and techniques of, cell and tissue culture, molecular biology, immunology, microbiology, genetics and protein and nucleic acid chemistry and hybridization described herein are those well known and commonly used in the art. The methods and techniques of the present invention are generally performed according to conventional methods well known in the art and as described in various general and more specific references that are cited and discussed throughout the present specification unless otherwise indicated. Enzymatic reactions and purification techniques are performed according to manufacturer's specifications, as commonly accomplished in the art or as described herein. The nomenclatures used in connection with, and the laboratory procedures and techniques of, analytical chemistry, synthetic organic chemistry, and medicinal and pharmaceutical chemistry described herein are those well known and commonly used in the art. Standard techniques are used for chemical syntheses, chemical analyses, pharmaceutical preparation, formulation, and delivery, and treatment of patients.

[0265] That the present invention may be more readily understood, select terms are defined below.

[0266] The term “polypeptide” as used herein, refers to any polymeric chain of amino acids. The terms “peptide” and “protein” are used interchangeably with the term polypeptide and also refer to a polymeric chain of amino acids. The term “polypeptide” encompasses native or artificial proteins, protein fragments and polypeptide analogs of a protein sequence. A polypeptide may be monomeric or polymeric. Use of “polypeptide” herein is intended to encompass polypeptide and fragments and variants (including fragments of variants) thereof, unless otherwise contradicted by context. For an antigenic polypeptide, a fragment of polypeptide optionally contains at least one contiguous or nonlinear epitope of polypeptide. The precise boundaries of the at least one epitope fragment can be confirmed using ordinary skill in the art. The fragment comprises at least about 5 contiguous amino acids, such as at least about 10 contiguous amino acids, at least about 15 contiguous amino acids, or at least about 20 contiguous amino acids. A variant of polypeptide is as described herein.

[0267] The term “isolated protein” or “isolated polypeptide” is a protein or polypeptide that by virtue of its origin or source of derivation is not associated with naturally associated components that accompany it in its native state; is substantially free of other proteins from the same species; is expressed by a cell from a different species; or does not occur in nature. Thus, a polypeptide that is chemically synthesized or synthesized in a cellular system different from the cell from which it naturally originates will be “isolated” from its naturally associated components. A protein may also be rendered substantially free of naturally associated components by isolation, using protein purification techniques well known in the art.

[0268] The term “recovering” as used herein, refers to the process of rendering a chemical species such as a polypeptide substantially free of naturally associated components by isolation, e.g., using protein purification techniques well known in the art.

[0269] “Biological activity” as used herein, refers to any one or more inherent biological properties of a molecule (whether present naturally as found in vivo, or provided or enabled by recombinant means). Biological properties include but are not limited to binding receptor; induction of cell proliferation, inhibiting cell growth, inductions of other cytokines, induction of apoptosis, and enzymatic activity. Biological activity also includes activity of an Ig molecule.

[0270] The terms “specific binding” or “specifically binding”, as used herein, in reference to the interaction of an antibody, a protein, or a peptide with a second chemical species, mean that the interaction is dependent upon the presence of a particular structure (e.g., an antigenic determinant or epitope) on the chemical species; for example, an antibody recognizes and binds to a specific protein structure rather than to proteins generally. If an antibody is specific for epitope “A”, the presence of a molecule containing epitope A (or free, unlabeled A), in a reaction containing labeled “A” and the antibody, will reduce the amount of labeled A bound to the antibody.

[0271] The term “antibody”, as used herein, broadly refers to any immunoglobulin (Ig) molecule comprised of four polypeptide chains, two heavy (H) chains and two light (L) chains, or any functional fragment, mutant, variant, or derivation thereof, which retains the essential epitope binding features of an Ig molecule. Such mutant, variant, or derivative antibody formats are known in the art. Nonlimiting embodiments of which are discussed below.

[0272] In a full-length antibody, each heavy chain is comprised of a heavy chain variable region (abbreviated herein as HCVR or VH) and a heavy chain constant region. The heavy chain constant region is comprised of three domains, CH1, CH2 and CH3. Each light chain is comprised of a light chain variable region (abbreviated herein as LCVR or VL) and a light chain constant region. The light chain constant region is comprised of one domain, CL. The VH and VL regions can be further subdivided into regions of hypervariability, termed complementarity determining regions (CDR), interspersed with regions that are more conserved, termed framework regions (FR). Each VH and VL is composed of three CDRs and four FRs, arranged from amino-terminus to carboxy-terminus in the following order: FR1, CDR1, FR2, CDR2, FR3, CDR3, FR4. Immunoglobulin molecules can be of any type (e.g., IgG, IgE, IgM, IgD, IgA and IgY), class (e.g., IgG1, IgG2, IgG 3, IgG4, IgA1 and IgA2) or subclass.

[0273] The term “Fc region” is used to define the C-terminal region of an immunoglobulin heavy chain, which may be generated by papain digestion of an intact antibody. The Fc region may be a native sequence Fc region or a variant Fc region. The Fc region of an immunoglobulin generally comprises two constant domains, a CH2 domain and a CH3 domain, and optionally comprises a CH4 domain. Replacements of amino acid residues in the Fc portion to alter antibody effector function are known in the art (Winter, et al. U.S. Pat. Nos. 5,648,260 and 5,624,821). The Fc portion of an antibody mediates several important effector functions e.g., cytokine induction, ADCC, phagocytosis, complement dependent cytotoxicity (CDC) and half-life/clearance rate of antibody and antigen-antibody complexes. In some cases these effector functions are desirable for therapeutic antibody but in other cases might be unnecessary or even deleterious, depending on the therapeutic objectives. Certain human IgG isotypes, particularly IgG1 and IgG3, mediate ADCC and CDC via binding to FcγRs and complement C1q, respectively. Neonatal Fc receptors (FcRn) are the critical components determining the circulating half-life of antibodies. In still another embodiment at least one amino acid residue is replaced in the constant region of the antibody, for example the Fc region of the antibody, such that effector functions of the antibody are altered. The dimerization of two identical heavy chains of an immunoglobulin is mediated by the dimerization of CH3 domains and is stabilized by the disulfide bonds within the hinge region (Huber et al. Nature; 264: 415-20; Thies et al 1999 J Mol Biol; 293: 67-79). Mutation of cysteine residues within the hinge regions to prevent heavy chain-heavy chain disulfide bonds will destabilize dimeration of CH3 domains. Residues responsible for CH3 dimerization have been identified (Dall'Acqua 1998 Biochemistry 37: 9266-73). Therefore, it is possible to generate a monovalent half-Ig. Interestingly, these monovalent half Ig molecules have been found in nature for both IgG and IgA subclasses (Seligman 1978 Ann Immunol 129: 855-70; Biewenga et al 1983 Clin Exp Immunol 51: 395-400). The stoichiometry of FcRn:Ig Fc region has been determined to be 2:1 (West et al 0.2000 Biochemistry 39: 9698-708), and half Fc is sufficient for mediating FcRn binding (Kim et al 1994 Eur J Immunol; 24: 542-548). Mutations to disrupt the dimerization of CH3 domain may not have greater adverse effect on its FcRn binding as the residues important for CH3 dimerization are located on the inner interface of CH3 b sheet structure, whereas the region responsible for FcRn binding is located on the outside interface of CH2-CH3 domains. However the half Ig molecule may have certain advantage in tissue penetration due to its smaller size than that of a regular antibody. In one embodiment at least one amino acid residue is replaced in the constant region of the binding protein of the invention, for example the Fc region, such that the dimerization of the heavy chains is disrupted, resulting in half DVD Ig molecules. The anti-inflammatory activity of IgG is completely dependent on sialylation of the N-linked glycan of the IgG Fc fragment. The precise glycan requirements for anti-inflammatory activity has been determined, such that an appropriate IgG1 Fc fragment can be created, thereby generating a recombinant, sialylated IgG1 Fc with greatly enhanced potency (Anthony, R. M., et al. (2008) Science 320:373-376).

[0274] The term “antigen-binding portion” of an antibody (or simply “antibody portion”), as used herein, refers to one or more fragments of an antibody that retain the ability to specifically bind to an antigen. It has been shown that the antigen-binding function of an antibody can be performed by fragments of a full-length antibody. Such antibody embodiments may also be bispecific, dual specific, or multi-specific formats; specifically binding to two or more different antigens. Examples of binding fragments encompassed within the term “antigen-binding portion” of an antibody include (i) a Fab fragment, a monovalent fragment consisting of the VL, VH, CL and CH1 domains; (ii) a F(ab′)₂ fragment, a bivalent fragment comprising two Fab fragments linked by a disulfide bridge at the hinge region; (iii) a Fd fragment consisting of the VH and CH1 domains; (iv) a Fv fragment consisting of the VL and VH domains of a single arm of an antibody, (v) a dAb fragment (Ward et al., (1989) Nature 341:544-546, Winter et al., PCT publication WO 90/05144 A1 herein incorporated by reference), which comprises a single variable domain; and (vi) an isolated complementarity determining region (CDR). Furthermore, although the two domains of the Fv fragment, VL and VH, are coded for by separate genes, they can be joined, using recombinant methods, by a synthetic linker that enables them to be made as a single protein chain in which the VL and VH regions pair to form monovalent molecules (known as single chain Fv (scFv); see e.g., Bird et al. (1988) Science 242:423-426; and Huston et al. (1988) Proc. Natl. Acad. Sci. USA 85:5879-5883). Such single chain antibodies are also intended to be encompassed within the term “antigen-binding portion” of an antibody. Other forms of single chain antibodies, such as diabodies are also encompassed. Diabodies are bivalent, bispecific antibodies in which VH and VL domains are expressed on a single polypeptide chain, but using a linker that is too short to allow for pairing between the two domains on the same chain, thereby forcing the domains to pair with complementary domains of another chain and creating two antigen binding sites (see e.g., Holliger, P., et al. (1993) Proc. Natl. Acad. Sci. USA 90:6444-6448; Poljak, R. J., et al. (1994) Structure 2:1121-1123). Such antibody binding portions are known in the art (Kontermann and Dubel eds., Antibody Engineering (2001) Springer-Verlag. New York. 790 pp. (ISBN 3-540-41354-5). In addition single chain antibodies also include “linear antibodies” comprising a pair of tandem Fv segments (VH-CH1-VH-CH1) which, together with complementary light chain polypeptides, form a pair of antigen binding regions (Zapata et al. Protein Eng. 8(10):1057-1062 (1995); and U.S. Pat. No. 5,641,870).

[0275] The term “multivalent binding protein” is used throughout this specification to denote a binding protein comprising two or more antigen binding sites. In an embodiment, the multivalent binding protein is engineered to have the three or more antigen binding sites, and is generally not a naturally occurring antibody. The term “multispecific binding protein” refers to a binding protein capable of binding two or more related or unrelated targets. Dual variable domain (DVD) binding proteins of the invention comprise two or more antigen binding sites and are tetravalent or multivalent binding proteins. DVDs may be monospecific, i.e., capable of binding one antigen or multispecific, i.e. capable of binding two or more antigens. DVD binding proteins comprising two heavy chain DVD polypeptides and two light chain DVD polypeptides are referred to as DVD-Ig. Each half of a DVD-Ig comprises a heavy chain DVD polypeptide, and a light chain DVD polypeptide, and two antigen binding sites. Each binding site comprises a heavy chain variable domain and a light chain variable domain with a total of 6 CDRs involved in antigen binding per antigen binding site.

[0276] The term “bispecific antibody”, as used herein, refers to full-length antibodies that are generated by quadroma technology (see Milstein, C. and A. C. Cuello, Nature, 1983. 305(5934): p. 537-40), by chemical conjugation of two different monoclonal antibodies (see Staerz, U. D., et al., Nature, 1985. 314(6012): p. 628-31), or by knob-into-hole or similar approaches which introduces mutations in the Fc region (see Holliger, P., T. Prospero, and G. Winter, Proc Natl Acad Sci USA, 1993. 90(14): p. 6444-8.18), resulting in multiple different immunoglobulin species of which only one is the functional bispecific antibody. By molecular function, a bispecific antibody binds one antigen (or epitope) on one of its two binding arms (one pair of HC/LC), and binds a different antigen (or epitope) on its second arm (a different pair of HC/LC). By this definition, a bispecific antibody has two distinct antigen binding arms (in both specificity and CDR sequences), and is monovalent for each antigen it binds to.

[0277] The term “dual-specific antibody”, as used herein, refers to full-length antibodies that can bind two different antigens (or epitopes) in each of its two binding arms (a pair of HC/LC) (see PCT publication WO 02/02773). Accordingly a dual-specific binding protein has two identical antigen binding arms, with identical specificity and identical CDR sequences, and is bivalent for each antigen it binds to.

[0278] A “functional antigen binding site” of a binding protein is one that is capable of binding a target antigen. The antigen binding affinity of the antigen binding site is not necessarily as strong as the parent antibody from which the antigen binding site is derived, but the ability to bind antigen must be measurable using any one of a variety of methods known for evaluating antibody binding to an antigen. Moreover, the antigen binding affinity of each of the antigen binding sites of a multivalent antibody herein need not be quantitatively the same.

[0279] The term “cytokine” is a generic term for proteins released by one cell population, which act on another cell population as intercellular mediators. Examples of such cytokines are lymphokines, monokines, and traditional polypeptide hormones. Included among the cytokines are growth hormone such as human growth hormone, N-methionyl human growth hormone, and bovine growth hormone; parathyroid hormone; thyroxine; insulin; proinsulin; relaxin; prorelaxin; glycoprotein hormones such as follicle stimulating hormone (FSH), thyroid stimulating hormone (TSH), and luteinizing hormone (LH); hepatic growth factor; fibroblast growth factor; prolactin; placental lactogen; tumor necrosis factor-alpha and -beta; mullerian-inhibiting substance; mouse gonadotropin-associated peptide; inhibin; activin; vascular endothelial growth factor; integrin; thrombopoietin (TPO); nerve growth factors such as NGF-alpha; platelet-growth factor; placental growth factor, transforming growth factors (TGFs) such as TGF-alpha and TGF-beta; insulin-like growth factor-1 and -11; erythropoietin (EPO); osteoinductive factors; interferons such as interferon-alpha, -beta and -gamma colony stimulating factors (CSFs) such as macrophage-CSF (M-CSF); granulocyte macrophage-CSF (GM-CSF); and granulocyte-CSF (G-CSF); interleukins (ILs) such as IL-1, IL-2, IL-3, IL-4, IL-5, IL-6, IL-7, IL-8, IL-9, IL-10, IL-11, IL-12, IL-13, IL-15, IL-18, IL-21, IL-22, IL-23, IL-33; a tumor necrosis factor such as TNF-alpha or TNF-beta; and other polypeptide factors including LIF and kit ligand (KL). As used herein, the term cytokine includes proteins from natural sources or from recombinant cell culture and biologically active equivalents of the native sequence cytokines.

[0280] The term “linker” is used to denote polypeptides comprising two or more amino acid residues joined by peptide bonds and are used to link one or more antigen binding portions. Such linker polypeptides are well known in the art (see e.g., Holliger, P., et al. (1993) Proc. Natl. Acad. Sci. USA 90:6444-6448; Poljak, R. J., et al. (1994) Structure 2:1121-1123). Exemplary linkers include, but are not limited to, AKTTPKLEEGEFSEAR (SEQ ID NO: 1); AKTTPKLEEGEFSEARV (SEQ ID NO: 2); AKTTPKLGG (SEQ ID NO: 3); SAKTTPKLGG (SEQ ID NO: 4); SAKTTP (SEQ ID NO: 5); RADAAP (SEQ ID NO: 6); RADAAPTVS (SEQ ID NO: 7); RADAAAAGGPGS (SEQ ID NO: 8); RADAAAA(G₄S)₄ (SEQ ID NO: 9); SAKTTPKLEEGEFSEARV (SEQ ID NO: 10); ADAAP (SEQ ID NO: 11); ADAAPTVSIFPP (SEQ ID NO: 12); TVAAP (SEQ ID NO: 13); TVAAPSVFIFPP (SEQ ID NO: 14); QPKAAP (SEQ ID NO: 15); QPKAAPSVTLFPP (SEQ ID NO: 16); AKTTPP (SEQ ID NO: 17); AKTTPPSVTPLAP (SEQ ID NO: 18); AKTTAP (SEQ ID NO: 19); AKTTAPSVYPLAP (SEQ ID NO: 20); ASTKGP (SEQ ID NO: 21); ASTKGPSVFPLAP (SEQ ID NO: 22), GGGGSGGGGSGGGGS (SEQ ID NO: 23); GENKVEYAPALMALS (SEQ ID NO: 24); GPAKELTPLKEAKVS (SEQ ID NO: 25); GHEAAAVMQVQYPAS (SEQ ID NO: 26).

[0281] An “immunoglobulin constant domain” refers to a heavy or light chain constant domain. Human IgG heavy chain and light chain constant domain amino acid sequences are known in the art.

[0282] The term “monoclonal antibody” or “mAb” as used herein refers to an antibody obtained from a population of substantially homogeneous antibodies, i.e., the individual antibodies comprising the population are identical except for possible naturally occurring mutations that may be present in minor amounts. Monoclonal antibodies are highly specific, being directed against a single antigen. Furthermore, in contrast to polyclonal antibody preparations that typically include different antibodies directed against different determinants (epitopes), each mAb is directed against a single determinant on the antigen. The modifier “monoclonal” is not to be construed as requiring production of the antibody by any particular method.

[0283] The term “human antibody”, as used herein, is intended to include antibodies having variable and constant regions derived from human germline immunoglobulin sequences. The human antibodies of the invention may include amino acid residues not encoded by human germline immunoglobulin sequences (e.g., mutations introduced by random or site-specific mutagenesis in vitro or by somatic mutation in vivo), for example in the CDRs and in particular CDR3. However, the term “human antibody”, as used herein, is not intended to include antibodies in which CDR sequences derived from the germline of another mammalian species, such as a mouse, have been grafted onto human framework sequences.

[0284] The term “recombinant human antibody”, as used herein, is intended to include all human antibodies that are prepared, expressed, created or isolated by recombinant means, such as antibodies expressed using a recombinant expression vector transfected into a host cell (described further in Section II C, below), antibodies isolated from a recombinant, combinatorial human antibody library (Hoogenboom H. R. (1997) TIB Tech. 15:62-70; Azzazy H., and Highsmith W. E. (2002) Clin. Biochem. 35:425-445; Gavilondo J. V., and Larrick J. W. (2002) BioTechniques 29:128-145; Hoogenboom H., and Chames P. (2000) Immunology Today 21:371-378), antibodies isolated from an animal (e.g., a mouse) that is transgenic for human immunoglobulin genes (see, Taylor, L. D., et al. (1992) Nucl. Acids Res. 20:6287-6295; Kellermann S-A, and Green L. L. (2002) Current Opinion in Biotechnology 13:593-597; Little M. et al. (2000) Immunology Today 21:364-370) or antibodies prepared, expressed, created or isolated by any other means that involves splicing of human immunoglobulin gene sequences to other DNA sequences. Such recombinant human antibodies have variable and constant regions derived from human germline immunoglobulin sequences. In certain embodiments, however, such recombinant human antibodies are subjected to in vitro mutagenesis (or, when an animal transgenic for human Ig sequences is used, in vivo somatic mutagenesis) and thus the amino acid sequences of the VH and VL regions of the recombinant antibodies are sequences that, while derived from and related to human germline VH and VL sequences, may not naturally exist within the human antibody germline repertoire in vivo.

[0285] An “affinity matured” antibody is an antibody with one or more alterations in one or more CDRs thereof which result an improvement in the affinity of the antibody for antigen, compared to a parent antibody which does not possess those alteration(s). Exemplary affinity matured antibodies will have nanomolar or even picomolar affinities for the target antigen. Affinity matured antibodies are produced by procedures known in the art. Marks et al. BidlTechnology 10:779-783 (1992) describes affinity maturation by VH and VL domain shuffling. Random mutagenesis of CDR and/or framework residues is described by: Barbas et al. Proc Nat. Acad. Sci, USA 91:3809-3813 (1994); Schier et al. Gene 169:147-155 (1995); Yelton et al. J. Immunol. 155:1994-2004 (1995); Jackson et al., J. Immunol. 154(7):3310-9 (1995); Hawkins et al, J. Mol. BioL 226:889-896 (1992) and selective mutation at selective mutagenesis positions, contact or hypermutation positions with an activity enhancing amino acid residue as described in U.S. Pat. No. 6,914,128B1.

[0286] The term “chimeric antibody” refers to antibodies which comprise heavy and light chain variable region sequences from one species and constant region sequences from another species, such as antibodies having murine heavy and light chain variable regions linked to human constant regions.

[0287] The term “CDR-grafted antibody” refers to antibodies which comprise heavy and light chain variable region sequences from one species but in which the sequences of one or more of the CDR regions of VH and/or VL are replaced with CDR sequences of another species, such as antibodies having murine heavy and light chain variable regions in which one or more of the murine CDRs (e.g., CDR3) has been replaced with human CDR sequences.

[0288] The term “humanized antibody” refers to antibodies which comprise heavy and light chain variable region sequences from a non-human species (e.g., a mouse) but in which at least a portion of the VH and/or VL sequence has been altered to be more “human-like”, i.e., more similar to human germline variable sequences. One type of humanized antibody is a CDR-grafted antibody, in which human CDR sequences are introduced into non-human VH and VL sequences to replace the corresponding nonhuman CDR sequences. Also “humanized antibody” is an antibody or a variant, derivative, analog or fragment thereof which immunospecifically binds to an antigen of interest and which comprises a framework (FR) region having substantially the amino acid sequence of a human antibody and a complementary determining region (CDR) having substantially the amino acid sequence of a non-human antibody. As used herein, the term “substantially” in the context of a CDR refers to a CDR having an amino acid sequence at least 80%, at least 85%, at least 90%, at least 95%, at least 98% or at least 99% identical to the amino acid sequence of a non-human antibody CDR. A humanized antibody comprises substantially all of at least one, and typically two, variable domains (Fab, Fab′, F(ab′)2, FabC, Fv) in which all or substantially all of the CDR regions correspond to those of a non-human immunoglobulin (i.e., donor antibody) and all or substantially all of the framework regions are those of a human immunoglobulin consensus sequence. In an embodiment, a humanized antibody also comprises at least a portion of an immunoglobulin constant region (Fc), typically that of a human immunoglobulin. In some embodiments, a humanized antibody contains both the light chain as well as at least the variable domain of a heavy chain. The antibody also may include the CH1, hinge, CH2, CH3, and CH4 regions of the heavy chain. In some embodiments, a humanized antibody only contains a humanized light chain. In some embodiments, a humanized antibody only contains a humanized heavy chain. In specific embodiments, a humanized antibody only contains a humanized variable domain of a light chain and/or humanized heavy chain.

[0289] The terms “Kabat numbering”, “Kabat definitions” and “Kabat labeling” are used interchangeably herein. These terms, which are recognized in the art, refer to a system of numbering amino acid residues which are more variable (i.e. hypervariable) than other amino acid residues in the heavy and light chain variable regions of an antibody, or an antigen binding portion thereof (Kabat et al. (1971) Ann. NY Acad, Sci. 190:382-391 and, Kabat, E. A., et al. (1991) Sequences of Proteins of Immunological Interest, Fifth Edition, U.S. Department of Health and Human Services, NIH Publication No. 91-3242). For the heavy chain variable region, the hypervariable region ranges from amino acid positions 31 to 35 for CDR1, amino acid positions 50 to 65 for CDR2, and amino acid positions 95 to 102 for CDR3. For the light chain variable region, the hypervariable region ranges from amino acid positions 24 to 34 for CDR1, amino acid positions 50 to 56 for CDR2, and amino acid positions 89 to 97 for CDR3.

[0290] As used herein, the term “CDR” refers to the complementarity determining region within antibody variable sequences. There are three CDRs in each of the variable regions of the heavy chain and the light chain, which are designated CDR1, CDR2 and CDR3, for each of the variable regions. The term “CDR set” as used herein refers to a group of three CDRs that occur in a single variable region capable of binding the antigen. The exact boundaries of these CDRs have been defined differently according to different systems. The system described by Kabat (Kabat et al., Sequences of Proteins of Immunological Interest (National Institutes of Health, Bethesda, Md. (1987) and (1991)) not only provides an unambiguous residue numbering system applicable to any variable region of an antibody, but also provides precise residue boundaries defining the three CDRs. These CDRs may be referred to as Kabat CDRs. Chothia and coworkers (Chothia &Lesk, J. Mol. Biol. 196:901-917 (1987) and Chothia et al., Nature 342:877-883 (1989)) found that certain sub-portions within Kabat CDRs adopt nearly identical peptide backbone conformations, despite having great diversity at the level of amino acid sequence. These sub-portions were designated as L1, L2 and L3 or H1, H2 and H3 where the “L” and the “H” designates the light chain and the heavy chains regions, respectively. These regions may be referred to as Chothia CDRs, which have boundaries that overlap with Kabat CDRs. Other boundaries defining CDRs overlapping with the Kabat CDRs have been described by Padlan (FASEB J. 9:133-139 (1995)) and MacCallum (J Mol Biol 262(5):732-45 (1996)). Still other CDR boundary definitions may not strictly follow one of the herein systems, but will nonetheless overlap with the Kabat CDRs, although they may be shortened or lengthened in light of prediction or experimental findings that particular residues or groups of residues or even entire CDRs do not significantly impact antigen binding. The methods used herein may utilize CDRs defined according to any of these systems, although certain embodiments use Kabat or Chothia defined CDRs.

[0291] As used herein, the term “framework” or “framework sequence” refers to the remaining sequences of a variable region minus the CDRs. Because the exact definition of a CDR sequence can be determined by different systems, the meaning of a framework sequence is subject to correspondingly different interpretations. The six CDRs (CDR-L1, -L2, and -L3 of light chain and CDR-H1, -H2, and -H3 of heavy chain) also divide the framework regions on the light chain and the heavy chain into four sub-regions (FR1, FR2, FR3 and FR4) on each chain, in which CDR1 is positioned between FR1 and FR2, CDR2 between FR2 and FR3, and CDR3 between FR3 and FR4. Without specifying the particular sub-regions as FR1, FR2, FR3 or FR4, a framework region, as referred by others, represents the combined FR's within the variable region of a single, naturally occurring immunoglobulin chain. As used herein, a FR represents one of the four sub-regions, and FRs represents two or more of the four sub-regions constituting a framework region.

[0292] As used herein, the term “germline antibody gene” or “gene fragment” refers to an immunoglobulin sequence encoded by non-lymphoid cells that have not undergone the maturation process that leads to genetic rearrangement and mutation for expression of a particular immunoglobulin. (See, e.g., Shapiro et al., Crit. Rev. Immunol. 22(3): 183-200 (2002); Marchalonis et al., Adv Exp Med. Biol. 484:13-30 (2001)). One of the advantages provided by various embodiments of the present invention stems from the recognition that germline antibody genes are more likely than mature antibody genes to conserve essential amino acid sequence structures characteristic of individuals in the species, hence less likely to be recognized as from a foreign source when used therapeutically in that species.

[0293] As used herein, the term “neutralizing” refers to counteracting the biological activity of an antigen when a binding protein specifically binds the antigen. In an embodiment, the neutralizing binding protein binds the cytokine and reduces its biologically activity by at least about 20%, 40%, 60%, 80%, 85% or more.

[0294] The term “activity” includes activities such as the binding specificity and affinity of a DVD-Ig for two or more antigens.

[0295] The term “epitope” includes any polypeptide determinant capable of specific binding to an immunoglobulin or T-cell receptor. In certain embodiments, epitope determinants include chemically active surface groupings of molecules such as amino acids, sugar side chains, phosphoryl, or sulfonyl, and, in certain embodiments, may have specific three dimensional structural characteristics, and/or specific charge characteristics. An epitope is a region of an antigen that is bound by an antibody. In certain embodiments, an antibody is said to specifically bind an antigen when it recognizes its target antigen in a complex mixture of proteins and/or macromolecules. Antibodies are said to “bind to the same epitope” if the antibodies cross-compete (one prevents the binding or modulating effect of the other). In addition structural definitions of epitopes (overlapping, similar, identical) are informative, but functional definitions are often more relevant as they encompass structural (binding) and functional (modulation, competition) parameters.

[0296] The term “surface plasmon resonance”, as used herein, refers to an optical phenomenon that allows for the analysis of real-time biospecific interactions by detection of alterations in protein concentrations within a biosensor matrix, for example using the BIAcore® system (BIAcore International AB, a GE Healthcare company, Uppsala, Sweden and Piscataway, N.J.). For further descriptions, see Jönsson, U., et al. (1993) Ann. Biol. Clin. 51:19-26; Jönsson, U., et al. (1991) Biotechniques 11:620-627; Johnsson, B., et al. (1995) J. Mol. Recognit. 8:125-131; and Johnnson, B., et al. (1991) Anal. Biochem. 198:268-277.

[0297] The term “Kₒₙ”, as used herein, is intended to refer to the on rate constant for association of a binding protein (e.g., an antibody) to the antigen to form the, e.g., antibody/antigen complex as is known in the art. The “Kₒₙ” also is known by the terms “association rate constant”, or “kₐ”, as used interchangeably herein. This value indicating the binding rate of an antibody to its target antigen or the rate of complex formation between an antibody and antigen also is shown by the equation below:

Antibody (“Ab”)+Antigen (“Ag”)→Ab-Ag.

[0298] The term “K_{off}”, as used herein, is intended to refer to the off rate constant for dissociation, or “dissociation rate constant”, of a binding protein (e.g., an antibody) from the, e.g., antibody/antigen complex as is known in the art. This value indicates the dissociation rate of an antibody from its target antigen or separation of Ab-Ag complex over time into free antibody and antigen as shown by the equation below:

Ab+Ag←Ab-Ag.

[0299] The term “K_{D}” as used herein, is intended to refer to the “equilibrium dissociation constant”, and refers to the value obtained in a titration measurement at equilibrium, or by dividing the dissociation rate constant (k_{off}) by the association rate constant (kₒₙ). The association rate constant, the dissociation rate constant and the equilibrium dissociation constant are used to represent the binding affinity of an antibody to an antigen. Methods for determining association and dissociation rate constants are well known in the art. Using fluorescence-based techniques offers high sensitivity and the ability to examine samples in physiological buffers at equilibrium. Other experimental approaches and instruments such as a BIAcore® (biomolecular interaction analysis) assay can be used (e.g., instrument available from BIAcore International AB, a GE Healthcare company, Uppsala, Sweden). Additionally, a KinExA® (Kinetic Exclusion Assay) assay, available from Sapidyne Instruments (Boise, Id.) can also be used.

[0300] “Label” and “detectable label” mean a moiety attached to a specific binding partner, such as an antibody or an analyte, e.g., to render the reaction between members of a specific binding pair, such as an antibody and an analyte, detectable, and the specific binding partner, e.g., antibody or analyte, so labeled is referred to as “detectably labeled.” Thus, the term “labeled binding protein” as used herein, refers to a protein with a label incorporated that provides for the identification of the binding protein. In an embodiment, the label is a detectable marker that can produce a signal that is detectable by visual or instrumental means, e.g., incorporation of a radiolabeled amino acid or attachment to a polypeptide of biotinyl moieties that can be detected by marked avidin (e.g., streptavidin containing a fluorescent marker or enzymatic activity that can be detected by optical or colorimetric methods). Examples of labels for polypeptides include, but are not limited to, the following: radioisotopes or radionuclides (e.g., ³H, ¹⁴C, ³⁵S, ⁹⁰Y, ⁹⁹Tc, ¹¹¹In, ¹²⁵I, ¹³¹I, ¹⁷⁷Lu, ¹⁶⁶Ho, or ¹⁵³Sm); chromogens, fluorescent labels (e.g., FITC, rhodamine, lanthanide phosphors), enzymatic labels (e.g., horseradish peroxidase, luciferase, alkaline phosphatase); chemiluminescent markers; biotinyl groups; predetermined polypeptide epitopes recognized by a secondary reporter (e.g., leucine zipper pair sequences, binding sites for secondary antibodies, metal binding domains, epitope tags); and magnetic agents, such as gadolinium chelates. Representative examples of labels commonly employed for immunoassays include moieties that produce light, e.g., acridinium compounds, and moieties that produce fluorescence, e.g., fluorescein. Other labels are described herein. In this regard, the moiety itself may not be detectably labeled but may become detectable upon reaction with yet another moiety. Use of “detectably labeled” is intended to encompass the latter type of detectable labeling.

[0301] The term “conjugate” refers to a binding protein, such as an antibody, chemically linked to a second chemical moiety, such as a therapeutic or cytotoxic agent. The term “agent” is used herein to denote a chemical compound, a mixture of chemical compounds, a biological macromolecule, or an extract made from biological materials. In an embodiment, the therapeutic or cytotoxic agents include, but are not limited to, pertussis toxin, taxol, cytochalasin B, gramicidin D, ethidium bromide, emetine, mitomycin, etoposide, tenoposide, vincristine, vinblastine, colchicin, doxorubicin, daunorubicin, dihydroxy anthracin dione, mitoxantrone, mithramycin, actinomycin D, 1-dehydrotestosterone, glucocorticoids, procaine, tetracaine, lidocaine, propranolol, and puromycin and analogs or homologs thereof. When employed in the context of an immunoassay, the conjugate antibody may be a detectably labeled antibody used as the detection antibody.

[0302] The terms “crystal” and “crystallized” as used herein, refer to a binding protein (e.g., an antibody), or antigen binding portion thereof, that exists in the form of a crystal. Crystals are one form of the solid state of matter, which is distinct from other forms such as the amorphous solid state or the liquid crystalline state. Crystals are composed of regular, repeating, three-dimensional arrays of atoms, ions, molecules (e.g., proteins such as antibodies), or molecular assemblies (e.g., antigen/antibody complexes). These three-dimensional arrays are arranged according to specific mathematical relationships that are well-understood in the field. The fundamental unit, or building block, that is repeated in a crystal is called the asymmetric unit. Repetition of the asymmetric unit in an arrangement that conforms to a given, well-defined crystallographic symmetry provides the “unit cell” of the crystal. Repetition of the unit cell by regular translations in all three dimensions provides the crystal. See Giege, R. and Ducruix, A. Barrett, Crystallization of Nucleic Acids and Proteins, a Practical Approach, 2nd ea., pp. 20 1-16, Oxford University Press, New York, N.Y., (1999).”

[0303] The term “polynucleotide” means a polymeric form of two or more nucleotides, either ribonucleotides or deoxynucleotides or a modified form of either type of nucleotide. The term includes single and double stranded forms of DNA.

[0304] The term “isolated polynucleotide” shall mean a polynucleotide (e.g., of genomic, cDNA, or synthetic origin, or some combination thereof) that, by virtue of its origin, the “isolated polynucleotide” is not associated with all or a portion of a polynucleotide with which the “isolated polynucleotide” is found in nature; is operably linked to a polynucleotide that it is not linked to in nature; or does not occur in nature as part of a larger sequence.

[0305] The term “vector”, is intended to refer to a nucleic acid molecule capable of transporting another nucleic acid to which it has been linked. One type of vector is a “plasmid”, which refers to a circular double stranded DNA loop into which additional DNA segments may be ligated. Another type of vector is a viral vector, wherein additional DNA segments may be ligated into the viral genome. Certain vectors are capable of autonomous replication in a host cell into which they are introduced (e.g., bacterial vectors having a bacterial origin of replication and episomal mammalian vectors). Other vectors (e.g., non-episomal mammalian vectors) can be integrated into the genome of a host cell upon introduction into the host cell, and thereby are replicated along with the host genome. Moreover, certain vectors are capable of directing the expression of genes to which they are operatively linked. Such vectors are referred to herein as “recombinant expression vectors” (or simply, “expression vectors”). In general, expression vectors of utility in recombinant DNA techniques are often in the form of plasmids. In the present specification, “plasmid” and “vector” may be used interchangeably as the plasmid is the most commonly used form of vector. However, the invention is intended to include such other forms of expression vectors, such as viral vectors (e.g., replication defective retroviruses, adenoviruses and adeno-associated viruses), which serve equivalent functions.

[0306] The term “operably linked” refers to a juxtaposition wherein the components described are in a relationship permitting them to function in their intended manner. A control sequence “operably linked” to a coding sequence is ligated in such a way that expression of the coding sequence is achieved under conditions compatible with the control sequences. “Operably linked” sequences include both expression control sequences that are contiguous with the gene of interest and expression control sequences that act in trans or at a distance to control the gene of interest. The term “expression control sequence” as used herein refers to polynucleotide sequences which are necessary to effect the expression and processing of coding sequences to which they are ligated. Expression control sequences include appropriate transcription initiation, termination, promoter and enhancer sequences; efficient RNA processing signals such as splicing and polyadenylation signals; sequences that stabilize cytoplasmic mRNA; sequences that enhance translation efficiency (i.e., Kozak consensus sequence); sequences that enhance protein stability; and when desired, sequences that enhance protein secretion. The nature of such control sequences differs depending upon the host organism; in prokaryotes, such control sequences generally include promoter, ribosomal binding site, and transcription termination sequence; in eukaryotes, generally, such control sequences include promoters and transcription termination sequence. The term “control sequences” is intended to include components whose presence is essential for expression and processing, and can also include additional components whose presence is advantageous, for example, leader sequences and fusion partner sequences.

[0307] “Transformation”, refers to any process by which exogenous DNA enters a host cell. Transformation may occur under natural or artificial conditions using various methods well known in the art. Transformation may rely on any known method for the insertion of foreign nucleic acid sequences into a prokaryotic or eukaryotic host cell. The method is selected based on the host cell being transformed and may include, but is not limited to, viral infection, electroporation, lipofection, and particle bombardment. Such “transformed” cells include stably transformed cells in which the inserted DNA is capable of replication either as an autonomously replicating plasmid or as part of the host chromosome. They also include cells which transiently express the inserted DNA or RNA for limited periods of time.

[0308] The term “recombinant host cell” (or simply “host cell”), is intended to refer to a cell into which exogenous DNA has been introduced. It should be understood that such terms are intended to refer not only to the particular subject cell, but, to the progeny of such a cell. Because certain modifications may occur in succeeding generations due to either mutation or environmental influences, such progeny may not, in fact, be identical to the parent cell, but are still included within the scope of the term “host cell” as used herein. In an embodiment, host cells include prokaryotic and eukaryotic cells selected from any of the Kingdoms of life. In another embodiment, eukaryotic cells include protist, fungal, plant and animal cells. In another embodiment, host cells include but are not limited to the prokaryotic cell line E. Coli; mammalian cell lines CHO, HEK 293, COS, NSO, SP2 and PER.C6; the insect cell line Sf9; and the fungal cell Saccharomyces cerevisiae.

[0309] Standard techniques may be used for recombinant DNA, oligonucleotide synthesis, and tissue culture and transformation (e.g., electroporation, lipofection). Enzymatic reactions and purification techniques may be performed according to manufacturer's specifications or as commonly accomplished in the art or as described herein. The foregoing techniques and procedures may be generally performed according to conventional methods well known in the art and as described in various general and more specific references that are cited and discussed throughout the present specification. See e.g., Sambrook et al. Molecular Cloning: A Laboratory Manual (2d ed., Cold Spring Harbor Laboratory Press, Cold Spring Harbor, N.Y. (1989)), which is incorporated herein by reference for any purpose.

[0310] “Transgenic organism”, as known in the art, refers to an organism having cells that contain a transgene, wherein the transgene introduced into the organism (or an ancestor of the organism) expresses a polypeptide not naturally expressed in the organism. A “transgene” is a DNA construct, which is stably and operably integrated into the genome of a cell from which a transgenic organism develops, directing the expression of an encoded gene product in one or more cell types or tissues of the transgenic organism.

[0311] The term “regulate” and “modulate” are used interchangeably, and, as used herein, refers to a change or an alteration in the activity of a molecule of interest (e.g., the biological activity of a cytokine). Modulation may be an increase or a decrease in the magnitude of a certain activity or function of the molecule of interest. Exemplary activities and functions of a molecule include, but are not limited to, binding characteristics, enzymatic activity, cell receptor activation, and signal transduction.

[0312] Correspondingly, the term “modulator” is a compound capable of changing or altering an activity or function of a molecule of interest (e.g., the biological activity of a cytokine). For example, a modulator may cause an increase or decrease in the magnitude of a certain activity or function of a molecule compared to the magnitude of the activity or function observed in the absence of the modulator. In certain embodiments, a modulator is an inhibitor, which decreases the magnitude of at least one activity or function of a molecule. Exemplary inhibitors include, but are not limited to, proteins, peptides, antibodies, peptibodies, carbohydrates or small organic molecules. Peptibodies are described, e.g., in WO01/83525.

[0313] The term “agonist”, refers to a modulator that, when contacted with a molecule of interest, causes an increase in the magnitude of a certain activity or function of the molecule compared to the magnitude of the activity or function observed in the absence of the agonist. Particular agonists of interest may include, but are not limited to, polypeptides, nucleic acids, carbohydrates, or any other molecules that bind to the antigen.

[0314] The term “antagonist” or “inhibitor”, refer to a modulator that, when contacted with a molecule of interest causes a decrease in the magnitude of a certain activity or function of the molecule compared to the magnitude of the activity or function observed in the absence of the antagonist. Particular antagonists of interest include those that block or modulate the biological or immunological activity of the antigen. Antagonists and inhibitors of antigens may include, but are not limited to, proteins, nucleic acids, carbohydrates, or any other molecules, which bind to the antigen.

[0315] As used herein, the term “effective amount” refers to the amount of a therapy which is sufficient to reduce or ameliorate the severity and/or duration of a disorder or one or more symptoms thereof, prevent the advancement of a disorder, cause regression of a disorder, prevent the recurrence, development, onset or progression of one or more symptoms associated with a disorder, detect a disorder, or enhance or improve the prophylactic or therapeutic effect(s) of another therapy (e.g., prophylactic or therapeutic agent).

[0316] “Patient” and “subject” may be used interchangeably herein to refer to an animal, such as a mammal, including a primate (for example, a human, a monkey, and a chimpanzee), a non-primate (for example, a cow, a pig, a camel, a llama, a horse, a goat, a rabbit, a sheep, a hamster, a guinea pig, a cat, a dog, a rat, a mouse, a whale), a bird (e.g., a duck or a goose), and a shark. Preferably, the patient or subject is a human, such as a human being treated or assessed for a disease, disorder or condition, a human at risk for a disease, disorder or condition, a human having a disease, disorder or condition, and/or human being treated for a disease, disorder or condition.

[0317] The term “sample”, as used herein, is used in its broadest sense. A “biological sample”, as used herein, includes, but is not limited to, any quantity of a substance from a living thing or formerly living thing. Such living things include, but are not limited to, humans, mice, rats, monkeys, dogs, rabbits and other animals. Such substances include, but are not limited to, blood, (e.g., whole blood), plasma, serum, urine, amniotic fluid, synovial fluid, endothelial cells, leukocytes, monocytes, other cells, organs, tissues, bone marrow, lymph nodes and spleen.

[0318] “Component,” “components,” and “at least one component,” refer generally to a capture antibody, a detection or conjugate antibody, a control, a calibrator, a series of calibrators, a sensitivity panel, a container, a buffer, a diluent, a salt, an enzyme, a co-factor for an enzyme, a detection reagent, a pretreatment reagent/solution, a substrate (e.g., as a solution), a stop solution, and the like that can be included in a kit for assay of a test sample, such as a patient urine, serum or plasma sample, in accordance with the methods described herein and other methods known in the art. Thus, in the context of the present disclosure, “at least one component,” “component,” and “components” can include a polypeptide or other analyte as above, such as a composition comprising an analyte such as polypeptide, which is optionally immobilized on a solid support, such as by binding to an anti-analyte (e.g., anti-polypeptide) antibody. Some components can be in solution or lyophilized for reconstitution for use in an assay.

[0319] “Control” refers to a composition known to not analyte (“negative control”) or to contain analyte (“positive control”). A positive control can comprise a known concentration of analyte. “Control,” “positive control,” and “calibrator” may be used interchangeably herein to refer to a composition comprising a known concentration of analyte. A “positive control” can be used to establish assay performance characteristics and is a useful indicator of the integrity of reagents (e.g., analytes).

[0320] “Predetermined cutoff” and “predetermined level” refer generally to an assay cutoff value that is used to assess diagnostic/prognostic/therapeutic efficacy results by comparing the assay results against the predetermined cutoff/level, where the predetermined cutoff/level already has been linked or associated with various clinical parameters (e.g., severity of disease, progression/nonprogression/improvement, etc.). While the present disclosure may provide exemplary predetermined levels, it is well-known that cutoff values may vary depending on the nature of the immunoassay (e.g., antibodies employed, etc.). It further is well within the ordinary skill of one in the art to adapt the disclosure herein for other immunoassays to obtain immunoassay-specific cutoff values for those other immunoassays based on this disclosure. Whereas the precise value of the predetermined cutoff/level may vary between assays, correlations as described herein (if any) should be generally applicable.

[0321] “Pretreatment reagent,” e.g., lysis, precipitation and/or solubilization reagent, as used in a diagnostic assay as described herein is one that lyses any cells and/or solubilizes any analyte that is/are present in a test sample. Pretreatment is not necessary for all samples, as described further herein. Among other things, solubilizing the analyte (e.g., polypeptide of interest) may entail release of the analyte from any endogenous binding proteins present in the sample. A pretreatment reagent may be homogeneous (not requiring a separation step) or heterogeneous (requiring a separation step). With use of a heterogeneous pretreatment reagent there is removal of any precipitated analyte binding proteins from the test sample prior to proceeding to the next step of the assay.

[0322] “Quality control reagents” in the context of immunoassays and kits described herein, include, but are not limited to, calibrators, controls, and sensitivity panels. A “calibrator” or “standard” typically is used (e.g., one or more, such as a plurality) in order to establish calibration (standard) curves for interpolation of the concentration of an analyte, such as an antibody or an analyte. Alternatively, a single calibrator, which is near a predetermined positive/negative cutoff, can be used. Multiple calibrators (i.e., more than one calibrator or a varying amount of calibrator(s)) can be used in conjunction so as to comprise a “sensitivity panel.”

[0323] “Risk” refers to the possibility or probability of a particular event occurring either presently or at some point in the future. “Risk stratification” refers to an array of known clinical risk factors that allows physicians to classify patients into a low, moderate, high or highest risk of developing a particular disease, disorder or condition.

[0324] “Specific” and “specificity” in the context of an interaction between members of a specific binding pair (e.g., an antigen (or fragment thereof) and an antibody (or antigenically reactive fragment thereof)) refer to the selective reactivity of the interaction. The phrase “specifically binds to” and analogous phrases refer to the ability of antibodies (or antigenically reactive fragments thereof) to bind specifically to analyte (or a fragment thereof) and not bind specifically to other entities.

[0325] “Specific binding partner” is a member of a specific binding pair. A specific binding pair comprises two different molecules, which specifically bind to each other through chemical or physical means. Therefore, in addition to antigen and antibody specific binding pairs of common immunoassays, other specific binding pairs can include biotin and avidin (or streptavidin), carbohydrates and lectins, complementary nucleotide sequences, effector and receptor molecules, cofactors and enzymes, enzyme inhibitors and enzymes, and the like. Furthermore, specific binding pairs can include members that are analogs of the original specific binding members, for example, an analyte-analog Immunoreactive specific binding members include antigens, antigen fragments, and antibodies, including monoclonal and polyclonal antibodies as well as complexes, fragments, and variants (including fragments of variants) thereof, whether isolated or recombinantly produced.

[0326] “Variant” as used herein means a polypeptide that differs from a given polypeptide (e.g., IL-18, BNP, NGAL or HIV polypeptide or anti-polypeptide antibody) in amino acid sequence by the addition (e.g., insertion), deletion, or conservative substitution of amino acids, but that retains the biological activity of the given polypeptide (e.g., a variant IL-18 can compete with anti-IL-18 antibody for binding to IL-18). A conservative substitution of an amino acid, i.e., replacing an amino acid with a different amino acid of similar properties (e.g., hydrophilicity and degree and distribution of charged regions) is recognized in the art as typically involving a minor change. These minor changes can be identified, in part, by considering the hydropathic index of amino acids, as understood in the art (see, e.g., Kyte et al., J. Mol. Biol. 157: 105-132 (1982)). The hydropathic index of an amino acid is based on a consideration of its hydrophobicity and charge. It is known in the art that amino acids of similar hydropathic indexes can be substituted and still retain protein function. In one aspect, amino acids having hydropathic indexes off 2 are substituted. The hydrophilicity of amino acids also can be used to reveal substitutions that would result in proteins retaining biological function. A consideration of the hydrophilicity of amino acids in the context of a peptide permits calculation of the greatest local average hydrophilicity of that peptide, a useful measure that has been reported to correlate well with antigenicity and immunogenicity (see, e.g., U.S. Pat. No. 4,554,101, which is incorporated herein by reference). Substitution of amino acids having similar hydrophilicity values can result in peptides retaining biological activity, for example immunogenicity, as is understood in the art. In one aspect, substitutions are performed with amino acids having hydrophilicity values within ±2 of each other. Both the hydrophobicity index and the hydrophilicity value of amino acids are influenced by the particular side chain of that amino acid. Consistent with that observation, amino acid substitutions that are compatible with biological function are understood to depend on the relative similarity of the amino acids, and particularly the side chains of those amino acids, as revealed by the hydrophobicity, hydrophilicity, charge, size, and other properties. “Variant” also can be used to describe a polypeptide or fragment thereof that has been differentially processed, such as by proteolysis, phosphorylation, or other post-translational modification, yet retains its biological activity or antigen reactivity, e.g., the ability to bind to IL-18. Use of “variant” herein is intended to encompass fragments of a variant unless otherwise contradicted by context.

### I. Generation of DVD Binding Protein

[0327] The invention pertains to Dual Variable Domain binding proteins capable of binding one or more targets and methods of making the same. In an embodiment, the binding protein comprises a polypeptide chain, wherein said polypeptide chain comprises VD1-(X1)n-VD2-C-(X2)n, wherein VD1 is a first variable domain, VD2 is a second variable domain, C is a constant domain, X1 represents an amino acid or polypeptide, X2 represents an Fc region and n is 0 or 1. The binding protein of the invention can be generated using various techniques. The invention provides expression vectors, host cell and methods of generating the binding protein.

### A. Generation of Parent Monoclonal Antibodies

[0328] The variable domains of the DVD binding protein can be obtained from parent antibodies, including polyclonal and mAbs capable of binding antigens of interest. These antibodies may be naturally occurring or may be generated by recombinant technology.

[0329] MAbs can be prepared using a wide variety of techniques known in the art including the use of hybridoma, recombinant, and phage display technologies, or a combination thereof. For example, mAbs can be produced using hybridoma techniques including those known in the art and taught, for example, in Harlow et al., Antibodies: A Laboratory Manual, (Cold Spring Harbor Laboratory Press, 2nd ed. 1988); Hammerling, et al., in: Monoclonal Antibodies and T-Cell Hybridomas 563-681 (Elsevier, N.Y., 1981) (said references incorporated by reference in their entireties). The term “monoclonal antibody” as used herein is not limited to antibodies produced through hybridoma technology. The term “monoclonal antibody” refers to an antibody that is derived from a single clone, including any eukaryotic, prokaryotic, or phage clone, and not the method by which it is produced. Hybridomas are selected, cloned and further screened for desirable characteristics, including robust hybridoma growth, high antibody production and desirable antibody characteristics, as discussed in Example 1 below. Hybridomas may be cultured and expanded in vivo in syngeneic animals, in animals that lack an immune system, e.g., nude mice, or in cell culture in vitro. Methods of selecting, cloning and expanding hybridomas are well known to those of ordinary skill in the art. In a particular embodiment, the hybridomas are mouse hybridomas. In another embodiment, the hybridomas are produced in a non-human, non-mouse species such as rats, sheep, pigs, goats, cattle or horses. In another embodiment, the hybridomas are human hybridomas, in which a human non-secretory myeloma is fused with a human cell expressing an antibody capable of binding a specific antigen.

[0330] Recombinant mAbs are also generated from single, isolated lymphocytes using a procedure referred to in the art as the selected lymphocyte antibody method (SLAM), as described in U.S. Pat. No. 5,627,052, PCT Publication WO 92/02551 and Babcock, J. S. et al. (1996) Proc. Natl. Acad. Sci. USA 93:7843-7848. In this method, single cells secreting antibodies of interest, e.g., lymphocytes derived from an immunized animal, are identified, and, heavy- and light-chain variable region cDNAs are rescued from the cells by reverse transcriptase-PCR and these variable regions can then be expressed, in the context of appropriate immunoglobulin constant regions (e.g., human constant regions), in mammalian host cells, such as COS or CHO cells. The host cells transfected with the amplified immunoglobulin sequences, derived from in vivo selected lymphocytes, can then undergo further analysis and selection in vitro, for example by panning the transfected cells to isolate cells expressing antibodies to the antigen of interest. The amplified immunoglobulin sequences further can be manipulated in vitro, such as by in vitro affinity maturation methods such as those described in PCT Publication WO 97/29131 and PCT Publication WO 00/56772.

[0331] Monoclonal antibodies are also produced by immunizing a non-human animal comprising some, or all, of the human immunoglobulin locus with an antigen of interest. In an embodiment, the non-human animal is a XENOMOUSE transgenic mouse, an engineered mouse strain that comprises large fragments of the human immunoglobulin loci and is deficient in mouse antibody production. See, e.g., Green et al. Nature Genetics 7:13-21 (1994) and U.S. Pat. Nos. 5,916,771, 5,939,598, 5,985,615, 5,998,209, 6,075,181, 6,091,001, 6,114,598 and 6,130,364. See also WO 91/10741, published Jul. 25, 1991, WO 94/02602, published Feb. 3, 1994, WO 96/34096 and WO 96/33735, both published Oct. 31, 1996, WO 98/16654, published Apr. 23, 1998, WO 98/24893, published Jun. 11, 1998, WO 98/50433, published Nov. 12, 1998, WO 99/45031, published Sep. 10, 1999, WO 99/53049, published Oct. 21, 1999, WO 00 09560, published Feb. 24, 2000 and WO 00/037504, published Jun. 29, 2000. The XENOMOUSE transgenic mouse produces an adult-like human repertoire of fully human antibodies, and generates antigen-specific human monoclonal antibodies. The XENOMOUSE transgenic mouse contains approximately 80% of the human antibody repertoire through introduction of megabase sized, germline configuration YAC fragments of the human heavy chain loci and x light chain loci. See Mendez et al., Nature Genetics 15:146-156 (1997), Green and Jakobovits J. Exp. Med. 188:483-495 (1998), the disclosures of which are hereby incorporated by reference.

[0332] In vitro methods also can be used to make the parent antibodies, wherein an antibody library is screened to identify an antibody having the desired binding specificity. Methods for such screening of recombinant antibody libraries are well known in the art and include methods described in, for example, Ladner et al. U.S. Pat. No. 5,223,409; Kang et al. PCT Publication No. WO 92/18619; Dower et al. PCT Publication No. WO 91/17271; Winter et al. PCT Publication No. WO 92/20791; Markland et al. PCT Publication No. WO 92/15679; Breitling et al. PCT Publication No. WO 93/01288; McCafferty et al. PCT Publication No. WO 92/01047; Garrard et al. PCT Publication No. WO 92/09690; Fuchs et al. (1991) Bio/Technology 9:1370-1372; Hay et al. (1992) Hum Antibod Hybridomas 3:81-85; Huse et al. (1989) Science 246:1275-1281; McCafferty et al., Nature (1990) 348:552-554; Griffiths et al. (1993) EMBO J 12:725-734; Hawkins et al. (1992) J Mol Biol 226:889-896; Clackson et al. (1991) Nature 352:624-628; Gram et al. (1992) PNAS 89:3576-3580; Garrad et al. (1991) Bio/Technology 9:1373-1377; Hoogenboom et al. (1991) Nuc Acid Res 19:4133-4137; and Barbas et al. (1991) PNAS 88:7978-7982, US patent application publication 20030186374, and PCT Publication No. WO 97/29131, the contents of each of which are incorporated herein by reference.

[0333] Parent antibodies of the present invention can also be generated using various phage display methods known in the art. In phage display methods, functional antibody domains are displayed on the surface of phage particles which carry the polynucleotide sequences encoding them. In a particular, such phage can be utilized to display antigen-binding domains expressed from a repertoire or combinatorial antibody library (e.g., human or murine). Phage expressing an antigen binding domain that binds the antigen of interest can be selected or identified with antigen, e.g., using labeled antigen or antigen bound or captured to a solid surface or bead. Phage used in these methods are typically filamentous phage including fd and M13 binding domains expressed from phage with Fab, Fv or disulfide stabilized Fv antibody domains recombinantly fused to either the phage gene III or gene VIII protein. Examples of phage display methods that can be used to make the antibodies of the present invention include those disclosed in Brinkman et al., J. Immunol. Methods 182:41-50 (1995); Ames et al., J. Immunol. Methods 184:177-186 (1995); Kettleborough et al., Eur. J. Immunol. 24:952-958 (1994); Persic et al., Gene 187 9-18 (1997); Burton et al., Advances in Immunology 57:191-280 (1994); PCT application No. PCT/GB91/01134; PCT publications WO 90/02809; WO 91/10737; WO 92/01047; WO 92/18619; WO 93/11236; WO 95/15982; WO 95/20401; and U.S. Pat. Nos. 5,698,426; 5,223,409; 5,403,484; 5,580,717; 5,427,908; 5,750,753; 5,821,047; 5,571,698; 5,427,908; 5,516,637; 5,780, 225; 5,658,727; 5,733,743 and 5,969,108; each of which is incorporated herein by reference in its entirety.

[0334] As described in the herein references, after phage selection, the antibody coding regions from the phage can be isolated and used to generate whole antibodies including human antibodies or any other desired antigen binding fragment, and expressed in any desired host, including mammalian cells, insect cells, plant cells, yeast, and bacteria, e.g., as described in detail below. For example, techniques to recombinantly produce Fab, Fab′ and F(ab′)₂ fragments can also be employed using methods known in the art such as those disclosed in PCT publication WO 92/22324; Mullinax et al., BioTechniques 12(6):864-869 (1992); and Sawai et al., AJRI 34:26-34 (1995); and Better et al., Science 240:1041-1043 (1988) (said references incorporated by reference in their entireties). Examples of techniques which can be used to produce single-chain Fvs and antibodies include those described in U.S. Pat. Nos. 4,946,778 and 5,258,498; Huston et al., Methods in Enzymology 203:46-88 (1991); Shu et al., PNAS 90:7995-7999 (1993); and Skerra et al., Science 240:1038-1040 (1988).

[0335] Alternative to screening of recombinant antibody libraries by phage display, other methodologies known in the art for screening large combinatorial libraries can be applied to the identification of parent antibodies. One type of alternative expression system is one in which the recombinant antibody library is expressed as RNA-protein fusions, as described in PCT Publication No. WO 98/31700 by Szostak and Roberts, and in Roberts, R. W. and Szostak, J. W. (1997) Proc. Natl. Acad. Sci. USA 94:12297-12302. In this system, a covalent fusion is created between an mRNA and the peptide or protein that it encodes by in vitro translation of synthetic mRNAs that carry puromycin, a peptidyl acceptor antibiotic, at their 3′ end. Thus, a specific mRNA can be enriched from a complex mixture of mRNAs (e.g., a combinatorial library) based on the properties of the encoded peptide or protein, e.g., antibody, or portion thereof, such as binding of the antibody, or portion thereof, to the dual specificity antigen. Nucleic acid sequences encoding antibodies, or portions thereof, recovered from screening of such libraries can be expressed by recombinant means as described herein (e.g., in mammalian host cells) and, moreover, can be subjected to further affinity maturation by either additional rounds of screening of mRNA-peptide fusions in which mutations have been introduced into the originally selected sequence(s), or by other methods for affinity maturation in vitro of recombinant antibodies, as described herein.

[0336] In another approach the parent antibodies can also be generated using yeast display methods known in the art. In yeast display methods, genetic methods are used to tether antibody domains to the yeast cell wall and display them on the surface of yeast. In particular, such yeast can be utilized to display antigen-binding domains expressed from a repertoire or combinatorial antibody library (e.g., human or murine). Examples of yeast display methods that can be used to make the parent antibodies include those disclosed in Wittrup, et al. U.S. Pat. No. 6,699,658 incorporated herein by reference.

[0337] The antibodies described herein can be further modified to generate CDR grafted and humanized parent antibodies. CDR-grafted parent antibodies comprise heavy and light chain variable region sequences from a human antibody wherein one or more of the CDR regions of V_{H} and/or V_{L} are replaced with CDR sequences of murine antibodies capable of binding antigen of interest. A framework sequence from any human antibody may serve as the template for CDR grafting. However, straight chain replacement onto such a framework often leads to some loss of binding affinity to the antigen. The more homologous a human antibody is to the original murine antibody, the less likely the possibility that combining the murine CDRs with the human framework will introduce distortions in the CDRs that could reduce affinity. Therefore, in an embodiment, the human variable framework that is chosen to replace the murine variable framework apart from the CDRs have at least a 65% sequence identity with the murine antibody variable region framework. In an embodiment, the human and murine variable regions apart from the CDRs have at least 70% sequence identify. In a particular embodiment, that the human and murine variable regions apart from the CDRs have at least 75% sequence identity. In another embodiment, the human and murine variable regions apart from the CDRs have at least 80% sequence identity. Methods for producing such antibodies are known in the art (see EP 239,400; PCT publication WO 91/09967; U.S. Pat. Nos. 5,225,539; 5,530,101; and 5,585,089), veneering or resurfacing (EP 592,106; EP 519,596; Padlan, Molecular Immunology 28(4/5):489-498 (1991); Studnicka et al., Protein Engineering 7(6):805-814 (1994); Roguska et al., PNAS 91:969-973 (1994)), and chain shuffling (U.S. Pat. No. 5,565,352); and anti-idiotypic antibodies.

[0338] Humanized antibodies are antibody molecules from non-human species antibody that binds the desired antigen having one or more complementarity determining regions (CDRs) from the non-human species and framework regions from a human immunoglobulin molecule. Known human Ig sequences are disclosed, e.g., www.ncbi.nlm.nih.gov/entrez-/query.fcgi; www.atcc.org/phage/hdb.html; www.sciquest.com/; www.abcam.com/; www.antibodyresource.com/onlinecomp.html; www.public.iastate.edu/.about.pedro/research_tools.html; www.mgen.uni-heidelberg.de/SD/IT/IT.html; www.whfreeman.com/immunology/CH-05/kuby05.htm; www.library.thinkquest.org/12429/Immune/Antibody.html; www.hhmi.org/grants/lectures/1996/vlab/; www.path.cam.ac.uk/.about.mrc7/mikeimages.html; www.antibodyresource.com/; mcb.harvard.edu/BioLinks/Immunology.html. www.immunologylink.com/; pathbox.wustl.edu/.about.hcenter/index.html; www.biotech.ufl.edu/.about.hcl/; www.pebio.com/pa/340913/340913.html; www.nal.usda.gov/awic/pubs/antibody/; www.m.ehime-u.acjp/.about.yasuhito-/Elisa.html; www.biodesign.com/table.asp; www.icnet.uk/axp/facs/davies/links.html; www.biotech.ufl.edu/.about.fccl/protocol.html; www.isac-net.org/sites_geo.html; aximtl.imt.uni-marburg.de/.about.rek/AEP-Start.html; baserv.uci.kun.nl/.about.jraats/links1.html; www.recab.uni-hd.de/immuno.bme.nwu.edu/; www.mrc-cpe.cam.ac.uk/imt-doc/public/INTRO.html; www.ibt.unam.mx/virNmice.html; imgt.cnusc.fr:8104/; www.biochem.ucl.ac.uk/.about.martin/abs/index.html; antibody.bath.ac.uk/; abgen.cvm.tamu.edu/lab/wwwabgen.html; www.unizh.ch/.about.honegger/AHOseminar/Slide01.html; www.cryst.bbk.ac.uk/.about.ubcg07s/; www.nimr.mrc.ac.uk/CC/ccaewg/ccaewg.htm; www.path.cam.ac.uk/.about.mrc7/humanisation/TAHHP.html; www.ibt.unam.mx/vir/structure/stataim.html; www.biosci.missouri.edu/smithgp/index.html; www.cryst.bioc.cam.ac.uk/.about.fmolina/Web-pages/Pept/spottech.html; www.jerini.de/fr roducts.htm; www.patents.ibm.com/ibm.html. Kabat et al., Sequences of Proteins of Immunological Interest, U.S. Dept. Health (1983), each entirely incorporated herein by reference. Such imported sequences can be used to reduce immunogenicity or reduce, enhance or modify binding, affinity, on-rate, off-rate, avidity, specificity, half-life, or any other suitable characteristic, as known in the art.

[0339] Framework residues in the human framework regions may be substituted with the corresponding residue from the CDR donor antibody to alter, e.g., improve, antigen binding. These framework substitutions are identified by methods well known in the art, e.g., by modeling of the interactions of the CDR and framework residues to identify framework residues important for antigen binding and sequence comparison to identify unusual framework residues at particular positions. (See, e.g., Queen et al., U.S. Pat. No. 5,585,089; Riechmann et al., Nature 332:323 (1988), which are incorporated herein by reference in their entireties.) Three-dimensional immunoglobulin models are commonly available and are familiar to those skilled in the art. Computer programs are available which illustrate and display probable three-dimensional conformational structures of selected candidate immunoglobulin sequences. Inspection of these displays permits analysis of the likely role of the residues in the functioning of the candidate immunoglobulin sequence, i.e., the analysis of residues that influence the ability of the candidate immunoglobulin to bind its antigen. In this way, FR residues can be selected and combined from the consensus and import sequences so that the desired antibody characteristic, such as increased affinity for the target antigen(s), is achieved. In general, the CDR residues are directly and most substantially involved in influencing antigen binding. Antibodies can be humanized using a variety of techniques known in the art, such as but not limited to those described in Jones et al., Nature 321:522 (1986); Verhoeyen et al., Science 239:1534 (1988)), Sims et al., J. Immunol. 151: 2296 (1993); Chothia and Lesk, J. Mol. Biol. 196:901 (1987), Carter et al., Proc. Natl. Acad. Sci. U.S.A. 89:4285 (1992); Presta et al., J. Immunol. 151:2623 (1993), Padlan, Molecular Immunology 28(4/5):489-498 (1991); Studnicka et al., Protein Engineering 7(6):805-814 (1994); Roguska, et al., PNAS 91:969-973 (1994); PCT publication WO 91/09967, PCT/: US98/16280, US96/18978, US91/09630, US91/05939, US94/01234, GB89/01334, GB91/01134, GB92/01755; WO90/14443, WO90/14424, WO90/14430, EP 229246, EP 592,106; EP 519,596, EP 239,400, U.S. Pat. Nos. 5,565,332, 5,723,323, 5,976,862, 5,824,514, 5,817,483, 5,814,476, 5,763,192, 5,723,323, 5,766,886, 5,714,352, 6,204,023, 6,180,370, 5,693,762, 5,530,101, 5,585,089, 5,225,539; 4,816,567, each entirely incorporated herein by reference, included references cited therein.

### B. Criteria for Selecting Parent Monoclonal Antibodies

[0340] An embodiment of the invention pertains to selecting parent antibodies with at least one or more properties desired in the DVD-Ig molecule. In an embodiment, the desired property is selected from one or more antibody parameters. In another embodiment, the antibody parameters are selected from the group consisting of antigen specificity, affinity to antigen, potency, biological function, epitope recognition, stability, solubility, production efficiency, immunogenicity, pharmacokinetics, bioavailability, tissue cross reactivity, and orthologous antigen binding.

### B1. Affinity to Antigen

[0341] The desired affinity of a therapeutic mAb may depend upon the nature of the antigen, and the desired therapeutic end-point. In an embodiment, monoclonal antibodies have higher affinities (Kd=0.01-0.50 pM) when blocking a cytokine-cytokine receptor interaction as such interaction are usually high affinity interactions (e.g., <pM-<nM ranges). In such instances, the mAb affinity for its target should be equal to or better than the affinity of the cytokine (ligand) for its receptor. On the other hand, mAb with lesser affinity (>nM range) could be therapeutically effective e.g., in clearing circulating potentially pathogenic proteins e.g., monoclonal antibodies that bind to, sequester, and clear circulating species of A-β amyloid. In other instances, reducing the affinity of an existing high affinity mAb by site-directed mutagenesis or using a mAb with lower affinity for its target could be used to avoid potential side-effects e.g., a high affinity mAb may sequester/neutralize all of its intended target, thereby completely depleting/eliminating the function(s) of the targeted protein. In this scenario, a low affinity mAb may sequester/neutralize a fraction of the target that may be responsible for the disease symptoms (the pathological or over-produced levels), thus allowing a fraction of the target to continue to perform its normal physiological function(s). Therefore, it may be possible to reduce the Kd to adjust dose and/or reduce side-effects. The affinity of the parental mAb might play a role in appropriately targeting cell surface molecules to achieve desired therapeutic out-come. For example, if a target is expressed on cancer cells with high density and on normal cells with low density, a lower affinity mAb will bind a greater number of targets on tumor cells than normal cells, resulting in tumor cell elimination via ADCC or CDC, and therefore might have therapeutically desirable effects. Thus selecting a mAb with desired affinity may be relevant for both soluble and surface targets.

[0342] Signaling through a receptor upon interaction with its ligand may depend upon the affinity of the receptor-ligand interaction. Similarly, it is conceivable that the affinity of a mAb for a surface receptor could determine the nature of intracellular signaling and whether the mAb may deliver an agonist or an antagonist signal. The affinity-based nature of mAb-mediated signaling may have an impact of its side-effect profile. Therefore, the desired affinity and desired functions of therapeutic monoclonal antibodies need to be determined carefully by in vitro and in vivo experimentation.

[0343] The desired Kd of a binding protein (e.g., an antibody) may be determined experimentally depending on the desired therapeutic outcome. In an embodiment parent antibodies with affinity (Kd) for a particular antigen equal to, or better than, the desired affinity of the DVD-Ig for the same antigen are selected. The antigen binding affinity and kinetics are assessed by Biacore or another similar technique. In one embodiment, each parent antibody has a dissociation constant (Kd) to its antigen selected from the group consisting of: at most about 10⁻⁷ M; at most about 10⁻⁸ M; at most about 10⁻⁹ M; at most about 10⁻¹⁰ M; at most about 10⁻¹¹ M; at most about 10⁻¹² M; and at most 10⁻¹³M. First parent antibody from which VD1 is obtained and second parent antibody from which VD2 is obtained may have similar or different affinity (K_{D}) for the respective antigen. Each parent antibody has an on rate constant (Kon) to the antigen selected from the group consisting of: at least about 10²M⁻¹s⁻¹; at least about 10³M⁻¹s⁻¹; at least about 10⁴M⁻¹s⁻¹; at least about 10⁵M⁻¹s⁻¹; and at least about 10⁶M⁻¹s⁻¹, as measured by surface plasmon resonance. The first parent antibody from which VD1 is obtained and the second parent antibody from which VD2 is obtained may have similar or different on rate constant (Kon) for the respective antigen. In one embodiment, each parent antibody has an off rate constant (Koff) to the antigen selected from the group consisting of: at most about 10⁻³ s⁻¹; at most about 10⁻⁴ s⁻¹; at most about 10⁻⁵ s⁻¹; and at most about 10⁻⁶ s⁻¹, as measured by surface plasmon resonance. The first parent antibody from which VD1 is obtained and the second parent antibody from which VD2 is obtained may have similar or different off rate constants (Koff) for the respective antigen.

### B2. Potency

[0344] The desired affinity/potency of parental monoclonal antibodies will depend on the desired therapeutic outcome. For example, for receptor-ligand (R-L) interactions the affinity (kd) is equal to or better than the R-L kd (pM range). For simple clearance of a pathologic circulating protein, the kd could be in low nM range e.g., clearance of various species of circulating A-β peptide. In addition, the kd will also depend on whether the target expresses multiple copies of the same epitope e.g a mAb targeting conformational epitope in Aβ oligomers.

[0345] Where VD1 and VD2 bind the same antigen, but distinct epitopes, the DVD-Ig will contain 4 binding sites for the same antigen, thus increasing avidity and thereby the apparent kd of the DVD-Ig. In an embodiment, parent antibodies with equal or lower kd than that desired in the DVD-Ig are chosen. The affinity considerations of a parental mAb may also depend upon whether the DVD-Ig contains four or more identical antigen binding sites (i.e; a DVD-Ig from a single mAb). In this case, the apparent kd would be greater than the mAb due to avidity. Such DVD-Igs can be employed for cross-linking surface receptor, increase neutralization potency, enhance clearance of pathological proteins etc.

[0346] In an embodiment parent antibodies with neutralization potency for specific antigen equal to or better than the desired neutralization potential of the DVD-Ig for the same antigen are selected. The neutralization potency can be assessed by a target-dependent bioassay where cells of appropriate type produce a measurable signal (i.e. proliferation or cytokine production) in response to target stimulation, and target neutralization by the mAb can reduce the signal in a dose-dependent manner.

### B3. Biological Functions

[0347] Monoclonal antibodies can perform potentially several functions. Some of these functions are listed in Table 1. These functions can be assessed by both in vitro assays (e.g., cell-based and biochemical assays) and in vivo animal models.

TABLE 1
Some Potential Applications For Therapeutic Antibodies

| Target (Class) | Mechanism of Action (target) |
|---|---|
| Soluble | Neutralization of activity (e.g., a cytokine) |
| (cytokines, other) | Enhance clearance (e.g., Aβ oligomers) |
| | Increase half-life (e.g., GLP 1) |
| Cell Surface | Agonist (e.g., GLP1 R; EPO R; etc.) |
| (Receptors, other) | Antagonist (e.g., integrins; etc.) |
| | Cytotoxic (CD 20; etc.) |
| Protein deposits | Enhance clearance/degradation |
| | (e.g., Aβ plaques, amyloid deposits) |

[0348] MAbs with distinct functions described in the examples herein in Table 1 can be selected to achieve desired therapeutic outcomes. Two or more selected parent monoclonal antibodies can then be used in DVD-Ig format to achieve two distinct functions in a single DVD-Ig molecule. For example, a DVD-Ig can be generated by selecting a parent mAb that neutralizes function of a specific cytokine, and selecting a parent mAb that enhances clearance of a pathological protein. Similarly, we can select two parent monoclonal antibodies that recognize two different cell surface receptors, one mAb with an agonist function on one receptor and the other mAb with an antagonist function on a different receptor. These two selected monoclonal antibodies each with a distinct function can be used to construct a single DVD-Ig molecule that will possess the two distinct functions (agonist and antagonist) of the selected monoclonal antibodies in a single molecule. Similarly, two antagonistic monoclonal antibodies to cell surface receptors each blocking binding of respective receptor ligands (e.g., EGF and IGF) can be used in a DVD-Ig format. Conversely, an antagonistic anti-receptor mAb (e.g., anti-EGFR) and a neutralizing anti-soluble mediator (e.g., anti-IGF1/2) mAb can be selected to make a DVD-Ig.

### B4. Epitope Recognition:

[0349] Different regions of proteins may perform different functions. For example specific regions of a cytokine interact with the cytokine receptor to bring about receptor activation whereas other regions of the protein may be required for stabilizing the cytokine. In this instance one may select a mAb that binds specifically to the receptor interacting region(s) on the cytokine and thereby block cytokine-receptor interaction. In some cases, for example certain chemokine receptors that bind multiple ligands, a mAb that binds to the epitope (region on chemokine receptor) that interacts with only one ligand can be selected. In other instances, monoclonal antibodies can bind to epitopes on a target that are not directly responsible for physiological functions of the protein, but binding of a mAb to these regions could either interfere with physiological functions (steric hindrance) or alter the conformation of the protein such that the protein cannot function (mAb to receptors with multiple ligand which alter the receptor conformation such that none of the ligand can bind). Anti-cytokine monoclonal antibodies that do not block binding of the cytokine to its receptor, but block signal transduction have also been identified (e.g., 125-2H, an anti-IL-18 mAb).

[0350] Examples of epitopes and mAb functions include, but are not limited to, blocking Receptor-Ligand (R-L) interaction (neutralizing mAb that binds R-interacting site); steric hindrance resulting in diminished or no R-binding. An Ab can bind the target at a site other than a receptor binding site, but still interferes with receptor binding and functions of the target by inducing conformational change and eliminate function (e.g., Xolair), binding to R but block signaling (125-2H).

[0351] In an embodiment, the parental mAb needs to target the appropriate epitope for maximum efficacy. Such epitope should be conserved in the DVD-Ig. The binding epitope of a mAb can be determined by several approaches, including co-crystallography, limited proteolysis of mAb-antigen complex plus mass spectrometric peptide mapping (Legros V. et al 2000 Protein Sci. 9:1002-10), phage displayed peptide libraries (O'Connor K H et al 2005 J Immunol Methods. 299:21-35), as well as mutagenesis (Wu C. et al. 2003 J Immunol 170:5571-7).

### B5. Physicochemical and Pharmaceutical Properties:

[0352] Therapeutic treatment with antibodies often requires administration of high doses, often several mg/kg (due to a low potency on a mass basis as a consequence of a typically large molecular weight). In order to accommodate patient compliance and to adequately address chronic disease therapies and outpatient treatment, subcutaneous (s.c.) or intramuscular (i.m.) administration of therapeutic mAbs is desirable. For example, the maximum desirable volume for s.c. administration is ˜1.0 mL, and therefore, concentrations of >100 mg/mL are desirable to limit the number of injections per dose. In an embodiment, the therapeutic antibody is administered in one dose. The development of such formulations is constrained, however, by protein-protein interactions (e.g., aggregation, which potentially increases immunogenicity risks) and by limitations during processing and delivery (e.g., viscosity). Consequently, the large quantities required for clinical efficacy and the associated development constraints limit full exploitation of the potential of antibody formulation and s.c. administration in high-dose regimens. It is apparent that the physicochemical and pharmaceutical properties of a protein molecule and the protein solution are of utmost importance, e.g., stability, solubility and viscosity features.

### B5.1. Stability:

[0353] A “stable” antibody formulation is one in which the antibody therein essentially retains its physical stability and/or chemical stability and/or biological activity upon storage. Stability can be measured at a selected temperature for a selected time period. In an embodiment the antibody in the formulation is stable at room temperature (about 30° C.) or at 40° C. for at least 1 month and/or stable at about 2-8° C. for at least 1 year for at least 2 years. Furthermore, in an embodiment, the formulation is stable following freezing (to, e.g., −70° C.) and thawing of the formulation, hereinafter referred to as a “freeze/thaw cycle.” In another example, a “stable” formulation may be one wherein less than about 10% and less than about 5% of the protein is present as an aggregate in the formulation.

[0354] A DVD-Ig stable in vitro at various temperatures for an extended time period is desirable. One can achieve this by rapid screening of parental mAbs stable in vitro at elevated temperature, e.g., at 40° C. for 2-4 weeks, and then assess stability. During storage at 2-8° C., the protein reveals stability for at least 12 months, e.g., at least 24 months. Stability (% of monomeric, intact molecule) can be assessed using various techniques such as cation exchange chromatography, size exclusion chromatography, SDS-PAGE, as well as bioactivity testing. For a more comprehensive list of analytical techniques that may be employed to analyze covalent and conformational modifications please see Jones, A. J. S. (1993) Analytical methods for the assessment of protein formulations and delivery systems. In: Cleland, J. L.; Langer, R., editors. Formulation and delivery of peptides and proteins, 1^{st} edition, Washington, ACS, pg. 22-45; and Pearlman, R.; Nguyen, T. H. (1990) Analysis of protein drugs. In: Lee, V. H., editor. Peptide and protein drug delivery, 1st edition, New York, Marcel Dekker, Inc., pg. 247-301.

[0355] Heterogeneity and aggregate formation: stability of the antibody may be such that the formulation may reveal less than about 10%, and, in an embodiment, less than about 5%, in another embodiment, less than about 2%, or, in an embodiment, within the range of 0.5% to 1.5% or less in the GMP antibody material that is present as aggregate. Size exclusion chromatography is a method that is sensitive, reproducible, and very robust in the detection of protein aggregates.

[0356] In addition to low aggregate levels, the antibody must, in an embodiment, be chemically stable. Chemical stability may be determined by ion exchange chromatography (e.g., cation or anion exchange chromatography), hydrophobic interaction chromatography, or other methods such as isoelectric focusing or capillary electrophoresis. For instance, chemical stability of the antibody may be such that after storage of at least 12 months at 2-8° C. the peak representing unmodified antibody in a cation exchange chromatography may increase not more than 20%, in an embodiment, not more than 10%, or, in another embodiment, not more than 5% as compared to the antibody solution prior to storage testing.

[0357] In an embodiment, the parent antibodies display structural integrity; correct disulfide bond formation, and correct folding: Chemical instability due to changes in secondary or tertiary structure of an antibody may impact antibody activity. For instance, stability as indicated by activity of the antibody may be such that after storage of at least 12 months at 2-8° C. the activity of the antibody may decrease not more than 50%, in an embodiment not more than 30%, or even not more than 10%, or in an embodiment not more than 5% or 1% as compared to the antibody solution prior to storage testing. Suitable antigen-binding assays can be employed to determine antibody activity.

### B5.2. Solubility:

[0358] The “solubility” of a mAb correlates with the production of correctly folded, monomeric IgG. The solubility of the IgG may therefore be assessed by HPLC. For example, soluble (monomeric) IgG will give rise to a single peak on the HPLC chromatograph, whereas insoluble (e.g., multimeric and aggregated) will give rise to a plurality of peaks. A person skilled in the art will therefore be able to detect an increase or decrease in solubility of an IgG using routine HPLC techniques. For a more comprehensive list of analytical techniques that may be employed to analyze solubility (see Jones, A. G. Dep. Chem. Biochem. Eng., Univ. Coll. London, London, UK. Editor(s): Shamlou, P. Ayazi. Process. Solid-Liq. Suspensions (1993), 93-117. Publisher: Butterworth-Heinemann, Oxford, UK and Pearlman, Rodney; Nguyen, Tue H, Advances in Parenteral Sciences (1990), 4 (Pept. Protein Drug Delivery), 247-301). Solubility of a therapeutic mAb is critical for formulating to high concentration often required for adequate dosing. As outlined herein, solubilities of >100 mg/mL may be required to accommodate efficient antibody dosing. For instance, antibody solubility may be not less than about 5 mg/mL in early research phase, in an embodiment not less than about 25 mg/mL in advanced process science stages, or in an embodiment not less than about 100 mg/mL, or in an embodiment not less than about 150 mg/mL. It is obvious to a person skilled in the art that the intrinsic properties of a protein molecule are important the physico-chemical properties of the protein solution, e.g., stability, solubility, viscosity. However, a person skilled in the art will appreciate that a broad variety of excipients exist that may be used as additives to beneficially impact the characteristics of the final protein formulation. These excipients may include: (i) liquid solvents, cosolvents (e.g., alcohols such as ethanol); (ii) buffering agents (e.g., phosphate, acetate, citrate, amino acid buffers); (iii) sugars or sugar alcohols (e.g., sucrose, trehalose, fructose, raffinose, mannitol, sorbitol, dextrans); (iv) surfactants (e.g., polysorbate 20, 40, 60, 80, poloxamers); (v) isotonicity modifiers (e.g., salts such as NaCl, sugars, sugar alcohols); and (vi) others (e.g., preservatives, chelating agents, antioxidants, chelating substances (e.g., EDTA), biodegradable polymers, carrier molecules (e.g., HSA, PEGs)

[0359] Viscosity is a parameter of high importance with regard to antibody manufacture and antibody processing (e.g., diafiltration/ultrafiltration), fill-finish processes (pumping aspects, filtration aspects) and delivery aspects (syringeability, sophisticated device delivery). Low viscosities enable the liquid solution of the antibody having a higher concentration. This enables the same dose may be administered in smaller volumes. Small injection volumes inhere the advantage of lower pain on injection sensations, and the solutions not necessarily have to be isotonic to reduce pain on injection in the patient. The viscosity of the antibody solution may be such that at shear rates of 100 (1/s) antibody solution viscosity is below 200 mPa s, in an embodiment below 125 mPa s, in another embodiment below 70 mPa s, and in yet another embodiment below 25 mPa s or even below 10 mPa s.

### B 5.3. Production Efficiency

[0360] The generation of a DVD-Ig that is efficiently expressed in mammalian cells, such as Chinese hamster ovary cells (CHO), will in an embodiment require two parental monoclonal antibodies which are themselves expressed efficiently in mammalian cells. The production yield from a stable mammalian line (i.e. CHO) should be above about 0.5 g/L, in an embodiment above about 1 g/L, and in another embodiment in the range of from about 2-5 g/L or more (Kipriyanov S M, Little M. 1999 Mol. Biotechnol. 12:173-201; Carroll S, Al-Rubeai M. 2004 Expert Opin Biol Ther. 4:1821-9).

[0361] Production of antibodies and Ig fusion proteins in mammalian cells is influenced by several factors. Engineering of the expression vector via incorporation of strong promoters, enhancers and selection markers can maximize transcription of the gene of interest from an integrated vector copy. The identification of vector integration sites that are permissive for high levels of gene transcription can augment protein expression from a vector (Wurm et al, 2004, Nature Biotechnology, 2004, Vol/Iss/Pg. 22/11 (1393-1398)). Furthermore, levels of production are affected by the ratio of antibody heavy and light chains and various steps in the process of protein assembly and secretion (Jiang et al. 2006, Biotechnology Progress, January-February 2006, vol. 22, no. 1, p. 313-8).

### B 6. Immunogenicity

[0362] Administration of a therapeutic mAb may results in certain incidence of an immune response (ie, the formation of endogenous antibodies directed against the therapeutic mAb).

[0363] Potential elements that might induce immunogenicity should be analyzed during selection of the parental monoclonal antibodies, and steps to reduce such risk can be taken to optimize the parental monoclonal antibodies prior to DVD-Ig construction. Mouse-derived antibodies have been found to be highly immunogenic in patients. The generation of chimeric antibodies comprised of mouse variable and human constant regions presents a logical next step to reduce the immunogenicity of therapeutic antibodies (Morrison and Schlom, 1990). Alternatively, immunogenicity can be reduced by transferring murine CDR sequences into a human antibody framework (reshaping/CDR grafting/humanization), as described for a therapeutic antibody by Riechmann et al., 1988. Another method is referred to as “resurfacing” or “veneering”, starting with the rodent variable light and heavy domains, only surface-accessible framework amino acids are altered to human ones, while the CDR and buried amino acids remain from the parental rodent antibody (Roguska et al., 1996). In another type of humanization, instead of grafting the entire CDRs, one technique grafts only the “specificity-determining regions” (SDRs), defined as the subset of CDR residues that are involved in binding of the antibody to its target (Kashmiri et al., 2005). This necessitates identification of the SDRs either through analysis of available three-dimensional structures of antibody-target complexes or mutational analysis of the antibody CDR residues to determine which interact with the target. Alternatively, fully human antibodies may have reduced immunogenicity compared to murine, chimeric or humanized antibodies.

[0364] Another approach to reduce the immunogenicity of therapeutic antibodies is the elimination of certain specific sequences that are predicted to be immunogenic. In one approach, after a first generation biologic has been tested in humans and found to be unacceptably immunogenic, the B-cell epitopes can be mapped and then altered to avoid immune detection. Another approach uses methods to predict and remove potential T-cell epitopes. Computational methods have been developed to scan and to identify the peptide sequences of biologic therapeutics with the potential to bind to MHC proteins (Desmet et al., 2005). Alternatively a human dendritic cell-based method can be used to identify CD4⁺T-cell epitopes in potential protein allergens (Stickler et al., 2005; S. L. Morrison and J. Schlom, Important Adv. Oncol. (1990), pp. 3-18; Riechmann, L., Clark, M., Waldmann, H. and Winter, G. “Reshaping human antibodies for therapy.” Nature (1988) 332: 323-327; Roguska-M-A, Pedersen-J-T, Henry-A-H, Searle-S-M, Roja-C-M, Avery-B, Hoffee-M, Cook-S, Lambert-J-M, Blättler-W-A, Rees-A-R, Guild-B-C. A comparison of two murine mAbs humanized by CDR-grafting and variable domain resurfacing. Protein engineering, {Protein-Eng}, 1996, vol. 9, p. 895-904; Kashmiri-Syed-V-S, De-Pascalis-Roberto, Gonzales-Noreen-R, Schlom-Jeffrey. SDR grafting—a new approach to antibody humanization. Methods (San Diego Calif.), {Methods}, May 2005, vol. 36, no. 1, p. 25-34; Desmet-Johan, Meersseman-Geert, Boutonnet-Nathalie, Pletinckx-Jurgen, De-Clercq-Krista, Debulpaep-Maja, Braeckman-Tessa, Lasters-Ignace. Anchor profiles of HLA-specific peptides: analysis by a novel affinity scoring method and experimental validation. Proteins, 2005, vol. 58, p. 53-69; Stickler-M-M, Estell-D-A, Harding-F-A. CD4+ T-cell epitope determination using unexposed human donor peripheral blood mononuclear cells. Journal of immunotherapy 2000, vol. 23, p. 654-60.)

### B 7. In Vivo Efficacy

[0365] To generate a DVD-Ig molecule with desired in vivo efficacy, it is important to generate and select mAbs with similarly desired in vivo efficacy when given in combination. However, in some instances the DVD-Ig may exhibit in vivo efficacy that cannot be achieved with the combination of two separate mAbs. For instance, a DVD-Ig may bring two targets in close proximity leading to an activity that cannot be achieved with the combination of two separate mAbs. Additional desirable biological functions are described herein in section B 3. Parent antibodies with characteristics desirable in the DVD-Ig molecule may be selected based on factors such as pharmacokinetic t ½; tissue distribution; soluble versus cell surface targets; and target concentration-soluble/density surface.

### B 8. In Vivo Tissue Distribution

[0366] To generate a DVD-Ig molecule with desired in vivo tissue distribution, in an embodiment parent mAbs with similar desired in vivo tissue distribution profile must be selected. Alternatively, based on the mechanism of the dual-specific targeting strategy, it may at other times not be required to select parent mAbs with the similarly desired in vivo tissue distribution when given in combination. For instance, in the case of a DVD-Ig in which one binding component targets the DVD-Ig to a specific site thereby bringing the second binding component to the same target site. For example, one binding specificity of a DVD-Ig could target pancreas (islet cells) and the other specificity could bring GLP1 to the pancreas to induce insulin.

### B 9. Isotype:

[0367] To generate a DVD-Ig molecule with desired properties including, but not limited to, Isotype, Effector functions and the circulating half-life, in an embodiment parent mAbs with appropriate Fc-effector functions depending on the therapeutic utility and the desired therapeutic end-point are selected. There are five main heavy-chain classes or isotypes some of which have several sub-types and these determine the effector functions of an antibody molecule. These effector functions reside in the hinge region, CH2 and CH3 domains of the antibody molecule. However, residues in other parts of an antibody molecule may have effects on effector functions as well. The hinge region Fc-effector functions include: (i) antibody-dependent cellular cytotoxicity, (ii) complement (C1q) binding, activation and complement-dependent cytotoxicity (CDC), (iii) phagocytosis/clearance of antigen-antibody complexes, and (iv) cytokine release in some instances. These Fc-effector functions of an antibody molecule are mediated through the interaction of the Fc-region with a set of class-specific cell surface receptors. Antibodies of the IgG1 isotype are most active while IgG2 and IgG4 having minimal or no effector functions. The effector functions of the IgG antibodies are mediated through interactions with three structurally homologous cellular Fc receptor types (and sub-types) (FcgR1, FcgRII and FcgRIII). These effector functions of an IgG1 can be eliminated by mutating specific amino acid residues in the lower hinge region (e.g., L234A, L235A) that are required for FcgR and C1q binding Amino acid residues in the Fc region, in particular the CH2-CH3 domains, also determine the circulating half-life of the antibody molecule. This Fc function is mediated through the binding of the Fc-region to the neonatal Fc receptor (FcRn) which is responsible for recycling of antibody molecules from the acidic lysosomes back to the general circulation.

[0368] Whether a mAb should have an active or an inactive isotype will depend on the desired therapeutic end-point for an antibody. Some examples of usage of isotypes and desired therapeutic outcome are listed below:
[0369] a) If the desired end-point is functional neutralization of a soluble cytokine then an inactive isotype may be used;
[0370] b) If the desired out-come is clearance of a pathological protein an active isotype may be used;
[0371] c) If the desired out-come is clearance of protein aggregates an active isotype may be used;
[0372] d) If the desired outcome is to antagonize a surface receptor an inactive isotype is used (Tysabri, IgG4; OKT3, mutated IgG1);
[0373] e) If the desired outcome is to eliminate target cells an active isotype is used (Herceptin, IgG1 (and with enhanced effector functions); and
[0374] f) If the desired outcome is to clear proteins from circulation without entering the CNS an IgM isotype may be used (e.g., clearing circulating Ab peptide species).
   The Fc effector functions of a parental mAb can be determined by various in vitro methods well known in the art.

[0375] As discussed, the selection of isotype, and thereby the effector functions will depend upon the desired therapeutic end-point. In cases where simple neutralization of a circulating target is desired, for example blocking receptor-ligand interactions, the effector functions may not be required. In such instances isotypes or mutations in the Fc-region of an antibody that eliminate effector functions are desirable. In other instances where elimination of target cells is the therapeutic end-point, for example elimination of tumor cells, isotypes or mutations or de-fucosylation in the Fc-region that enhance effector functions are desirable (Presta G L, Adv. Drug Delivery Rev. 58:640-656, 2006; Satoh M., Iida S., Shitara K. Expert Opinion Biol. Ther. 6:1161-1173, 2006). Similarly, depending up on the therapeutic utility, the circulating half-life of an antibody molecule can be reduced/prolonged by modulating antibody-FcRn interactions by introducing specific mutations in the Fc region (Dall'Acqua W F, Kiener P A, Wu H. J. Biol. Chem. 281:23514-23524, 2006; Petkova S B., Akilesh S., Sproule T J. et al. Internat. Immunol. 18:1759-1769, 2006; Vaccaro C., Bawdon R., Wanjie S et al. PNAS 103:18709-18714, 2007).

[0376] The published information on the various residues that influence the different effector functions of a normal therapeutic mAb may need to be confirmed for DVD-Ig. It may be possible that in a DVD-Ig format additional (different) Fc-region residues, other than those identified for the modulation of monoclonal antibody effector functions, may be important.

[0377] Overall, the decision as to which Fc-effector functions (isotype) will be critical in the final DVD-Ig format will depend up on the disease indication, therapeutic target, desired therapeutic end-point and safety considerations. Listed below are exemplary appropriate heavy chain and light chain constant regions including, but not limited to:
[0378] IgG1—allotype: G1mz
[0379] IgG1 mutant—A234, A235
[0380] IgG2—allotype: G2m(n−)
[0381] Kappa—Km3
[0382] Lambda

[0383] Fc Receptor and C1q Studies: The possibility of unwanted antibody-dependent cell-mediated cytotoxicity (ADCC) and complement-dependent cytotoxicity (CDC) by antibody complexing to any overexpressed target on cell membranes can be abrogated by the (for example, L234A, L235A) hinge-region mutations. These substituted amino acids, present in the IgG1 hinge region of mAb, are expected to result in diminished binding of mAb to human Fc receptors (but not FcRn), as FcgR binding is thought to occur within overlapping sites on the IgG1 hinge region. This feature of mAb may lead to an improved safety profile over antibodies containing a wild-type IgG. Binding of mAb to human Fc receptors can be determined by flow cytometry experiments using cell lines (e.g., THP-1, K562) and an engineered CHO cell line that expresses FcgRIIb (or other FcgRs). Compared to IgG1 control monoclonal antibodies, mAb show reduced binding to FcgRI and FcgRIIa whereas binding to FcgRIIb is unaffected. The binding and activation of C1q by antigen/IgG immune complexes triggers the classical complement cascade with consequent inflammatory and/or immunoregulatory responses. The C1q binding site on IgGs has been localized to residues within the IgG hinge region. C1q binding to increasing concentrations of mAb was assessed by C1q ELISA. The results demonstrate that mAb is unable to bind to C1q, as expected when compared to the binding of a wildtype control IgG1. Overall, the L234A, L235A hinge region mutation abolishes binding of mAb to FcgRI, FcgRIIa and C1q but does not impact the interaction of mAb with FcgRIIb. This data suggests that in vivo, mAb with mutant Fc will interact normally with the inhibitory FcgRIIb but will likely fail to interact with the activating FcgRI and FcgRIIa receptors or C1q.

[0384] Human FcRn binding: The neonatal receptor (FcRn) is responsible for transport of IgG across the placenta and to control the catabolic half-life of the IgG molecules. It might be desirable to increase the terminal half-life of an antibody to improve efficacy, to reduce the dose or frequency of administration, or to improve localization to the target. Alternatively, it might be advantageous to do the converse that is, to decrease the terminal half-life of an antibody to reduce whole body exposure or to improve the target-to-non-target binding ratios. Tailoring the interaction between IgG and its salvage receptor, FcRn, offers a way to increase or decrease the terminal half-life of IgG. Proteins in the circulation, including IgG, are taken up in the fluid phase through micropinocytosis by certain cells, such as those of the vascular endothelia. IgG can bind FcRn in endosomes under slightly acidic conditions (pH 6.0-6.5) and can recycle to the cell surface, where it is released under almost neutral conditions (pH 7.0-7.4). Mapping of the Fc-region-binding site on FcRn80, 16, 17 showed that two histidine residues that are conserved across species, His310 and His435, are responsible for the pH dependence of this interaction. Using phage-display technology, a mouse Fc-region mutation that increases binding to FcRn and extends the half-life of mouse IgG was identified (see Victor, G. et al.; Nature Biotechnology (1997), 15(7), 637-640). Fc-region mutations that increase the binding affinity of human IgG for FcRn at pH 6.0, but not at pH 7.4, have also been identified (see Dall'Acqua William F, et al., Journal of Immunology (2002), 169(9), 5171-80). Moreover, in one case, a similar pH-dependent increase in binding (up to 27-fold) was also observed for rhesus FcRn, and this resulted in a twofold increase in serum half-life in rhesus monkeys compared with the parent IgG (see Hinton, Paul R. et al., Journal of Biological Chemistry (2004), 279(8), 6213-6216). These findings indicate that it is feasible to extend the plasma half-life of antibody therapeutics by tailoring the interaction of the Fc region with FcRn. Conversely, Fc-region mutations that attenuate interaction with FcRn can reduce antibody half-life.

### B.10 Pharmacokinetics (PK):

[0385] To generate a DVD-Ig molecule with desired pharmacokinetic profile, in an embodiment parent mAbs with the similarly desired pharmacokinetic profile are selected. One consideration is that immunogenic response to monoclonal antibodies (ie, HAHA, human anti-human antibody response; HACA, human anti-chimeric antibody response) further complicates the pharmacokinetics of these therapeutic agents. In an embodiment, monoclonal antibodies with minimal or no immunogenicity are used for constructing DVD-Ig molecules such that the resulting DVD-Igs will also have minimal or no immunogenicity. Some of the factors that determine the PK of a mAb include, but are not limited to, Intrinsic properties of the mAb (VH amino acid sequence); immunogenicity; FcRn binding and Fc functions.

[0386] The PK profile of selected parental monoclonal antibodies can be easily determined in rodents as the PK profile in rodents correlates well with (or closely predicts) the PK profile of monoclonal antibodies in cynomolgus monkey and humans. The PK profile is determined as described in Example section 1.2.2.3.A.

[0387] After the parental monoclonal antibodies with desired PK characteristics (and other desired functional properties as discussed herein) are selected, the DVD-Ig is constructed. As the DVD-Ig molecules contain two antigen-binding domains from two parental monoclonal antibodies, the PK properties of the DVD-Ig are assessed as well. Therefore, while determining the PK properties of the DVD-Ig, PK assays may be employed that determine the PK profile based on functionality of both antigen-binding domains derived from the 2 parent monoclonal antibodies. The PK profile of a DVD-Ig can be determined as described in Example 1.2.2.3.A. Additional factors that may impact the PK profile of DVD-Ig include the antigen-binding domain (CDR) orientation; Linker size; and Fc/FcRn interactions. PK characteristics of parent antibodies can be evaluated by assessing the following parameters: absorption, distribution, metabolism and excretion.

[0388] Absorption: To date, administration of therapeutic monoclonal antibodies is via parenteral routes (e.g., intravenous [IV], subcutaneous [SC], or intramuscular [IM]). Absorption of a mAb into the systemic circulation following either SC or IM administration from the interstitial space is primarily through the lymphatic pathway. Saturable, presystemic, proteolytic degradation may result in variable absolute bioavailability following extravascular administration. Usually, increases in absolute bioavailability with increasing doses of monoclonal antibodies may be observed due to saturated proteolytic capacity at higher doses. The absorption process for a mAb is usually quite slow as the lymph fluid drains slowly into the vascular system, and the duration of absorption may occur over hours to several days. The absolute bioavailability of monoclonal antibodies following SC administration generally ranges from 50% to 100%.

[0389] Distribution: Following IV administration, monoclonal antibodies usually follow a biphasic serum (or plasma) concentration-time profile, beginning with a rapid distribution phase, followed by a slow elimination phase. In general, a biexponential pharmacokinetic model best describes this kind of pharmacokinetic profile. The volume of distribution in the central compartment (Vc) for a mAb is usually equal to or slightly larger than the plasma volume (2-3 liters). A distinct biphasic pattern in serum (plasma) concentration versus time profile may not be apparent with other parenteral routes of administration, such as IM or SC, because the distribution phase of the serum (plasma) concentration-time curve is masked by the long absorption portion. Many factors, including physicochemical properties, site-specific and target-oriented receptor mediated uptake, binding capacity of tissue, and mAb dose can influence biodistribution of a mAb. Some of these factors can contribute to nonlinearity in biodistribution for a mAb.

[0390] Metabolism and Excretion: Due to the molecular size, intact monoclonal antibodies are not excreted into the urine via kidney. They are primarily inactivated by metabolism (e.g., catabolism). For IgG-based therapeutic monoclonal antibodies, half-lives typically ranges from hours or 1-2 days to over 20 days. The elimination of a mAb can be affected by many factors, including, but not limited to, affinity for the FcRn receptor, immunogenicity of the mAb, the degree of glycosylation of the mAb, the susceptibility for the mAb to proteolysis, and receptor-mediated elimination.

### B.11 Tissue Cross-Reactivity Pattern on Human and Tox Species:

[0391] Identical staining pattern suggests that potential human toxicity can be evaluated in tox species. Tox species are those animal in which unrelated toxicity is studied.

[0392] The individual antibodies are selected to meet two criteria. (1) Tissue staining appropriate for the known expression of the antibody target. (2) Similar staining pattern between human and tox species tissues from the same organ.

[0393] Criterion 1: Immunizations and/or antibody selections typically employ recombinant or synthesized antigens (proteins, carbohydrates or other molecules). Binding to the natural counterpart and counterscreen against unrelated antigens are often part of the screening funnel for therapeutic antibodies. However, screening against a multitude of antigens is often unpractical. Therefore tissue cross-reactivity studies with human tissues from all major organs serve to rule out unwanted binding of the antibody to any unrelated antigens.

[0394] Criterion 2: Comparative tissue cross reactivity studies with human and tox species tissues (cynomolgus monkey, dog, possibly rodents and others, the same 36 or 37 tissues are being tested as in the human study) help to validate the selection of a tox species. In the typical tissue cross-reactivity studies on frozen tissues sections therapeutic antibodies may demonstrate the expected binding to the known antigen and/or to a lesser degree binding to tissues based either on low level interactions (unspecific binding, low level binding to similar antigens, low level charge based interactions etc.). In any case the most relevant toxicology animal species is the one with the highest degree of coincidence of binding to human and animal tissue.

[0395] Tissue cross reactivity studies follow the appropriate regulatory guidelines including EC CPMP Guideline III/5271/94 “Production and quality control of mAbs” and the 1997 US FDA/CBER “Points to Consider in the Manufacture and Testing of Monoclonal Antibody Products for Human Use”. Cryosections (5 μm) of human tissues obtained at autopsy or biopsy were fixed and dried on object glass. The peroxidase staining of tissue sections was performed, using the avidin-biotin system. FDA's Guidance “Points to Consider in the Manufacture and Testing of Monoclonal Antibody Products for Human Use”. Relevant references include Clarke J 2004, Boon L. 2002a, Boon L 2002b, Ryan A 1999.

[0396] Tissue cross reactivity studies are often done in two stages, with the first stage including cryosections of 32 tissues (typically: Adrenal Gland, Gastrointestinal Tract, Prostate, Bladder, Heart, Skeletal Muscle, Blood Cells, Kidney, Skin, Bone Marrow, Liver, Spinal Cord, Breast, Lung, Spleen, Cerebellum, Lymph Node, Testes, Cerebral Cortex, Ovary, Thymus, Colon, Pancreas, Thyroid, Endothelium, Parathyroid, Ureter, Eye, Pituitary, Uterus, Fallopian Tube and Placenta) from one human donor. In the second phase a full cross reactivity study is performed with up to 38 tissues (including adrenal, blood, blood vessel, bone marrow, cerebellum, cerebrum, cervix, esophagus, eye, heart, kidney, large intestine, liver, lung, lymph node, breast mammary gland, ovary, oviduct, pancreas, parathyroid, peripheral nerve, pituitary, placenta, prostate, salivary gland, skin, small intestine, spinal cord, spleen, stomach, striated muscle, testis, thymus, thyroid, tonsil, ureter, urinary bladder, and uterus) from 3 unrelated adults. Studies are done typically at minimally two dose levels.

[0397] The therapeutic antibody (i.e. test article) and isotype matched control antibody may be biotinylated for avidin-biotin complex (ABC) detection; other detection methods may include tertiary antibody detection for a FITC (or otherwise) labeled test article, or precomplexing with a labeled anti-human IgG for an unlabeled test article.

[0398] Briefly, cryosections (about 5 μm) of human tissues obtained at autopsy or biopsy are fixed and dried on object glass. The peroxidase staining of tissue sections is performed, using the avidin-biotin system. First (in case of a precomplexing detection system), the test article is incubated with the secondary biotinylated anti-human IgG and developed into immune complex. The immune complex at the final concentrations of 2 and 10 μg/mL of test article is added onto tissue sections on object glass and then the tissue sections were reacted for 30 minutes with a avidin-biotin-peroxidase kit. Subsequently, DAB (3,3′-diaminobenzidine), a substrate for the peroxidase reaction, was applied for 4 minutes for tissue staining. Antigen-Sepharose beads are used as positive control tissue sections.

[0399] Any specific staining is judged to be either an expected (e.g., consistent with antigen expression) or unexpected reactivity based upon known expression of the target antigen in question. Any staining judged specific is scored for intensity and frequency. Antigen or serum competion or blocking studies can assist further in determining whether observed staining is specific or nonspecific.

[0400] If two selected antibodies are found to meet the selection criteria appropriate tissue staining, matching staining between human and toxicology animal specific tissue they can be selected for DVD-Ig generation.

[0401] The tissue cross reactivity study has to be repeated with the final DVD-Ig construct, but while these studies follow the same protocol as outline herein, they are more complex to evaluate because any binding can come from any of the two parent antibodies, and any unexplained binding needs to be confirmed with complex antigen competition studies.

[0402] It is readily apparent that the complex undertaking of tissue crossreactivity studies with a multispecific molecule like a DVD-Ig is greatly simplified if the two parental antibodies are selected for (1) lack of unexpected tissue cross reactivity findings and (2) for appropriate similarity of tissue cross reactivity findings between the corresponding human and toxicology animal species tissues.

### B.12 Specificity and Selectivity:

[0403] To generate a DVD-Ig molecule with desired specificity and selectivity, one needs to generate and select parent mAbs with the similarly desired specificity and selectivity profile.

[0404] Binding studies for specificity and selectivity with a DVD-Ig can be complex due to the four or more binding sites, two each for each antigen. Briefly, binding studies using ELISA, BIAcore. KinExA or other interaction studies with a DVD-Ig need to monitor the binding of one, two or more antigens to the DVD-Ig molecule. While BIAcore technology can resolve the sequential, independent binding of multiple antigens, more traditional methods including ELISA or more modern techniques like KinExA cannot. Therefore careful characterization of each parent antibody is critical. After each individual antibody has been characterized for specificity, confirmation of specificity retention of the individual binding sites in the DVD-Ig molecule is greatly simplified.

[0405] It is readily apparent that the complex undertaking of determining the specificity of a DVD-Ig is greatly simplified if the two parental antibodies are selected for specificity prior to being combined into a DVD-Ig.

[0406] Antigen-antibody interaction studies can take many forms, including many classical protein protein interaction studies, including ELISA (Enzyme linked immunosorbent assay), Mass spectrometry, chemical cross linking, SEC with light scattering, equilibrium dialysis, gel permeation, ultrafiltration, gel chromatography, large-zone analytical SEC, micropreparative ultracentrigugation (sedimentation equilibrium), spectroscopic methods, titration microcalorimetry, sedimentation equilibrium (in analytical ultracentrifuge), sedimentation velocity (in analytical centrifuge), surface plasmon resonance (including BIAcore). Relevant references include “Current Protocols in Protein Science”, John E. Coligan, Ben M. Dunn, David W. Speicher, Paul T, Wingfield (eds.) Volume 3, chapters 19 and 20, published by John Wiley & Sons Inc., and references included therein and “Current Protocols in Immunology”, John E. Coligan, Barbara E. Bierer, David H. Margulies, Ethan M. Shevach, Warren Strober (eds.) published by John Wiley & Sons Inc and relevant references included therein.

[0407] Cytokine Release in Whole Blood: The interaction of mAb with human blood cells can be investigated by a cytokine release assay (Wing, M. G. Therapeutic Immunology (1995), 2(4), 183-190; “Current Protocols in Pharmacology”, S. J. Enna, Michael Williams, John W. Ferkany, Terry Kenakin, Paul Moser, (eds.) published by John Wiley & Sons Inc; Madhusudan, S. Clinical Cancer Research (2004), 10(19), 6528-6534; Cox, J. Methods (2006), 38(4), 274-282; Choi, I. European Journal of Immunology (2001), 31(1), 94-106). Briefly, various concentrations of mAb are incubated with human whole blood for 24 hours. The concentration tested should cover a wide range including final concentrations mimicking typical blood levels in patients (including but not limited to 100 ng/ml-100 μg/ml). Following the incubation, supernatants and cell lysates were analyzed for the presence of IL-1Rα, TNF-α, IL-1b, IL-6 and IL-8. Cytokine concentration profiles generated for mAb were compared to profiles produced by a negative human IgG control and a positive LPS or PHA control. The cytokine profile displayed by mAb from both cell supernatants and cell lysates was comparable to control human IgG. In an embodiment, the monoclonal antibody does not interact with human blood cells to spontaneously release inflammatory cytokines.

[0408] Cytokine release studies for a DVD-Ig are complex due to the four or more binding sites, two each for each antigen. Briefly, cytokine release studies as described herein measure the effect of the whole DVD-Ig molecule on whole blood or other cell systems, but can resolve which portion of the molecule causes cytokine release. Once cytokine release has been detected, the purity of the DVD-Ig preparation has to be ascertained, because some co-purifying cellular components can cause cytokine release on their own. If purity is not the issue, fragmentation of DVD-Ig (including but not limited to removal of Fc portion, separation of binding sites etc.), binding site mutagenesis or other methods may need to be employed to deconvolute any observations. It is readily apparent that this complex undertaking is greatly simplified if the two parental antibodies are selected for lack of cytokine release prior to being combined into a DVD-Ig.

### B.13 Cross Reactivity to Other Species for Toxicological Studies:

[0409] In an embodiment, the individual antibodies selected with sufficient cross-reactivity to appropriate tox species, for example, cynomolgus monkey. Parental antibodies need to bind to orthologous species target (i.e. cynomolgus monkey) and elicit appropriate response (modulation, neutralization, activation). In an embodiment, the cross-reactivity (affinity/potency) to orthologous species target should be within 10-fold of the human target. In practice, the parental antibodies are evaluated for multiple species, including mouse, rat, dog, monkey (and other non-human primates), as well as disease model species (i.e. sheep for asthma model). The acceptable cross-reactivity to tox species from the perantal monoclonal antibodies allows future toxicology studies of DVD-Ig-Ig in the same species. For that reason, the two parental monoclonal antibodies should have acceptable cross-reactivity for a common tox species therefore allowing toxicology studies of DVD-Ig in the same species.

[0410] Parent mAbs may be selected from various mAbs capable of binding specific targets and well known in the art. These include, but are not limited to anti-TNF antibody (U.S. Pat. No. 6,258,562), anti-IL-12 and/or anti-IL-12p40 antibody (U.S. Pat. No. 6,914,128); anti-IL-18 antibody (US 2005/0147610 A1), anti-05, anti-CBL, anti-CD147, anti-gp120, anti-VLA-4, anti-CD11a, anti-CD18, anti-VEGF, anti-CD40L, anti CD-40 (e.g., see WO2007124299) anti-Id, anti-ICAM-1, anti-CXCL13, anti-CD2, anti-EGFR, anti-TGF-beta 2, anti-HGF, anti-cMet, anti DLL-4, anti-NPR1, anti-PLGF, anti-ErbB3, anti-E-selectin, anti-Fact VII, anti-Her2/neu, anti-F gp, anti-CD11/18, anti-CD14, anti-ICAM-3, anti-RON, anti CD-19, anti-CD80 (e.g., see WO2003039486, anti-CD4, anti-CD3, anti-CD23, anti-beta2-integrin, anti-alpha4beta7, anti-CD52, anti-HLA DR, anti-CD22 (e.g., see U.S. Pat. No. 5,789,554), anti-CD20, anti-MIF, anti-CD64 (FcR), anti-TCR alpha beta, anti-CD2, anti-Hep B, anti-CA 125, anti-EpCAM, anti-gp120, anti-CMV, anti-gpIIbIIIa, anti-IgE, anti-CD25, anti-CD33, anti-HLA, anti-IGF1,2, anti IGFR, anti-VNRintegrin, anti-IL-1alpha, anti-IL-1beta, anti-IL-1 receptor, anti-IL-2 receptor, anti-IL-4, anti-IL-4 receptor, anti-IL5, anti-IL-5 receptor, anti-IL-6, anti-IL-8, anti-IL-9, anti-IL-13, anti-IL-13 receptor, anti-IL-17, and anti-IL-23 (see Presta L G. 2005 Selection, design, and engineering of therapeutic antibodies J Allergy Clin Immunol. 116:731-6 and http://www.path.cam.ac.uk/˜mrc7/humanisation/antibodies.html).

[0411] Parent mAbs may also be selected from various therapeutic antibodies approved for use, in clinical trials, or in development for clinical use. Such therapeutic antibodies include, but are not limited to, rituximab (Rituxan®, IDEC/Genentech/Roche) (see for example U.S. Pat. No. 5,736,137), a chimeric anti-CD20 antibody approved to treat Non-Hodgkin's lymphoma; HuMax-CD20, an anti-CD20 currently being developed by Genmab, an anti-CD20 antibody described in U.S. Pat. No. 5,500,362, AME-133 (Applied Molecular Evolution), hA20 (Immunomedics, Inc.), HumaLYM (Intracel), and PRO70769 (PCT/US2003/040426, entitled “Immunoglobulin Variants and Uses Thereof”), trastuzumab (Herceptin®, Genentech) (see for example U.S. Pat. No. 5,677,171), a humanized anti-Her2/neu antibody approved to treat breast cancer; pertuzumab (rhuMab-2C4, Omnitarg®), currently being developed by Genentech; an anti-Her2 antibody described in U.S. Pat. No. 4,753,894; cetuximab (Erbitux®, Imclone) (U.S. Pat. No. 4,943,533; PCT WO 96/40210), a chimeric anti-EGFR antibody in clinical trials for a variety of cancers; ABX-EGF (U.S. Pat. No. 6,235,883), currently being developed by Abgenix-Immunex-Amgen; HuMax-EGFr (U.S. Ser. No. 10/172,317), currently being developed by Genmab; 425, EMD55900, EMD62000, and EMD72000 (Merck KGaA) (U.S. Pat. No. 5,558,864; Murthy et al. 1987, Arch Biochem Biophys. 252(2):549-60; Rodeck et al., 1987, J Cell Biochem. 35(4):315-20; Kettleborough et al., 1991, Protein Eng. 4(7):773-83); ICR62 (Institute of Cancer Research) (PCT WO 95/20045; Modjtahedi et al., 1993, J. Cell Biophys. 1993, 22(1-3):129-46; Modjtahedi et al., 1993, Br J. Cancer. 1993, 67(2):247-53; Modjtahedi et al, 1996, Br J Cancer, 73(2):228-35; Modjtahedi et al, 2003, Int J Cancer, 105(2):273-80); TheraCIM hR3 (YM Biosciences, Canada and Centro de Immunologia Molecular, Cuba (U.S. Pat. No. 5,891,996; U.S. Pat. No. 6,506,883; Mateo et al, 1997, Immunotechnology, 3(1):71-81); mAb-806 (Ludwig Institue for Cancer Research, Memorial Sloan-Kettering) (Jungbluth et al. 2003, Proc Natl Acad Sci USA. 100(2):639-44); KSB-102 (KS Biomedix); MR1-1 (IVAX, National Cancer Institute) (PCT WO 0162931A2); and SC100 (Scancell) (PCT WO 01/88138); alemtuzumab (Campath®, Millenium), a humanized mAb currently approved for treatment of B-cell chronic lymphocytic leukemia; muromonab-CD3 (Orthoclone OKT3®), an anti-CD3 antibody developed by Ortho Biotech/Johnson & Johnson, ibritumomab tiuxetan (Zevalin®), an anti-CD20 antibody developed by IDEC/Schering AG, gemtuzumab ozogamicin (Mylotarg®), an anti-CD33 (p67 protein) antibody developed by Celltech/Wyeth, alefacept (Amevive®), an anti-LFA-3 Fc fusion developed by Biogen), abciximab (ReoPro®), developed by Centocor/Lilly, basiliximab (Simulect®), developed by Novartis, palivizumab (Synagis®), developed by Medimmune, infliximab (Remicade®), an anti-TNFalpha antibody developed by Centocor, adalimumab (Humira®), an anti-TNFalpha antibody developed by Abbott, Humicade®, an anti-TNFalpha antibody developed by Celltech, golimumab (CNTO-148), a fully human TNF antibody developed by Centocor, etanercept (Enbrel®), an p75 TNF receptor Fc fusion developed by Immunex/Amgen, lenercept, an p55TNF receptor Fc fusion previously developed by Roche, ABX-CBL, an anti-CD147 antibody being developed by Abgenix, ABX-IL8, an anti-IL8 antibody being developed by Abgenix, ABX-MA1, an anti-MUC18 antibody being developed by Abgenix, Pemtumomab (R1549, 90Y-muHMFG1), an anti-MUC1 in development by Antisoma, Therex (R1550), an anti-MUC1 antibody being developed by Antisoma, AngioMab (AS1405), being developed by Antisoma, HuBC-1, being developed by Antisoma, Thioplatin (AS1407) being developed by Antisoma, Antegren® (natalizumab), an anti-alpha-4-beta-1 (VLA-4) and alpha-4-beta-7 antibody being developed by Biogen, VLA-1 mAb, an anti-VLA-1 integrin antibody being developed by Biogen, LTBR mAb, an anti-lymphotoxin beta receptor (LTBR) antibody being developed by Biogen, CAT-152, an anti-TGF-β2 antibody being developed by Cambridge Antibody Technology, ABT 874 (J695), an anti-IL-12 p40 antibody being developed by Abbott, CAT-192, an anti-TGFβ1 antibody being developed by Cambridge Antibody Technology and Genzyme, CAT-213, an anti-Eotaxin1 antibody being developed by Cambridge Antibody Technology, LymphoStat-B® an anti-Blys antibody being developed by Cambridge Antibody Technology and Human Genome Sciences Inc., TRAIL-R1 mAb, an anti-TRAIL-R1 antibody being developed by Cambridge Antibody Technology and Human Genome Sciences, Inc., Avastin® bevacizumab, rhuMAb-VEGF), an anti-VEGF antibody being developed by Genentech, an anti-HER receptor family antibody being developed by Genentech, Anti-Tissue Factor (ATF), an anti-Tissue Factor antibody being developed by Genentech, Xolair® (Omalizumab), an anti-IgE antibody being developed by Genentech, Raptiva® (Efalizumab), an anti-CD11a antibody being developed by Genentech and Xoma, MLN-02 Antibody (formerly LDP-02), being developed by Genentech and Millenium Pharmaceuticals, HuMax CD4, an anti-CD4 antibody being developed by Genmab, HuMax-IL15, an anti-IL15 antibody being developed by Genmab and Amgen, HuMax-Inflam, being developed by Genmab and Medarex, HuMax-Cancer, an anti-Heparanase I antibody being developed by Genmab and Medarex and Oxford GcoSciences, HuMax-Lymphoma, being developed by Genmab and Amgen, HuMax-TAC, being developed by Genmab, IDEC-131, and anti-CD40L antibody being developed by IDEC Pharmaceuticals, IDEC-151 (Clenoliximab), an anti-CD4 antibody being developed by IDEC Pharmaceuticals, IDEC-114, an anti-CD80 antibody being developed by IDEC Pharmaceuticals, IDEC-152, an anti-CD23 being developed by IDEC Pharmaceuticals, anti-macrophage migration factor (MIF) antibodies being developed by IDEC Pharmaceuticals, BEC2, an anti-idiotypic antibody being developed by Imclone, IMC-1C11, an anti-KDR antibody being developed by Imclone, DC101, an anti-flk-1 antibody being developed by Imclone, anti-VE cadherin antibodies being developed by Imclone, CEA-Cide® (labetuzumab), an anti-carcinoembryonic antigen (CEA) antibody being developed by Immunomedics, LymphoCide® (Epratuzumab), an anti-CD22 antibody being developed by Immunomedics, AFP-Cide, being developed by Immunomedics, MyelomaCide, being developed by Immunomedics, LkoCide, being developed by Immunomedics, ProstaCide, being developed by Immunomedics, MDX-010, an anti-CTLA4 antibody being developed by Medarex, MDX-060, an anti-CD30 antibody being developed by Medarex, MDX-070 being developed by Medarex, MDX-018 being developed by Medarex, Osidem® (IDM-1), and anti-Her2 antibody being developed by Medarex and Immuno-Designed Molecules, HuMax®-CD4, an anti-CD4 antibody being developed by Medarex and Genmab, HuMax-IL15, an anti-IL15 antibody being developed by Medarex and Genmab, CNTO 148, an anti-TNFα antibody being developed by Medarex and Centocor/J&J, CNTO 1275, an anti-cytokine antibody being developed by Centocor/J&J, MOR101 and MOR102, anti-intercellular adhesion molecule-1 (ICAM-1) (CD54) antibodies being developed by MorphoSys, MOR201, an anti-fibroblast growth factor receptor 3 (FGFR-3) antibody being developed by MorphoSys, Nuvion® (visilizumab), an anti-CD3 antibody being developed by Protein Design Labs, HuZAF®, an anti-gamma interferon antibody being developed by Protein Design Labs, Anti-α 5β1 Integrin, being developed by Protein Design Labs, anti-IL-12, being developed by Protein Design Labs, ING-1, an anti-Ep-CAM antibody being developed by Xoma, Xolair® (Omalizumab) a humanized anti-IgE antibody developed by Genentech and Novartis, and MLN01, an anti-Beta2 integrin antibody being developed by Xoma, all of the herein-cited references in this paragraph are expressly incorporated herein by reference. In another embodiment, the therapeutics include KRN330 (Kirin); huA33 antibody (A33, Ludwig Institute for Cancer Research); CNTO 95 (alpha V integrins, Centocor); MEDI-522 (alpha Vβ3 integrin, Medimmune); volociximab (alpha Vβ1 integrin, Biogen/PDL); Human mAb 216 (B cell glycosolated epitope, NCl); BiTE MT103 (bispecific CD19×CD3, Medimmune); 4G7×H22 (Bispecific BcellxFcgammaR1, Medarex/Merck KGa); rM28 (Bispecific CD28×MAPG, US Patent No. EP1444268); MDX447 (EMD 82633) (Bispecific CD64×EGFR, Medarex); Catumaxomab (removab) (Bispecific EpCAM×anti-CD3, Trion/Fres); Ertumaxomab (bispecific HER2/CD3, Fresenius Biotech); oregovomab (OvaRex) (CA-125, ViRexx); Rencarex® (WX G250) (carbonic anhydrase IX, Wilex); CNTO 888 (CCL2, Centocor); TRC105 (CD105 (endoglin), Tracon); BMS-663513 (CD137 agonist, Brystol Myers Squibb); MDX-1342 (CD19, Medarex); Siplizumab (MEDI-507) (CD2, Medimmune); Ofatumumab (Humax-CD20) (CD20, Genmab); Rituximab (Rituxan) (CD20, Genentech); veltuzumab (hA20) (CD20, Immunomedics); Epratuzumab (CD22, Amgen); lumiliximab (IDEC 152) (CD23, Biogen); muromonab-CD3 (CD3, Ortho); HuM291 (CD3 fc receptor, PDL Biopharma); HeFi-1, CD30, NCl); MDX-060 (CD30, Medarex); MDX-1401 (CD30, Medarex); SGN-30 (CD30, Seattle Genentics); SGN-33 (Lintuzumab) (CD33, Seattle Genentics); Zanolimumab (HuMax-CD4) (CD4, Genmab); HCD122 (CD40, Novartis); SGN-40 (CD40, Seattle Genentics); Campath1h (Alemtuzumab) (CD52, Genzyme); MDX-1411 (CD70, Medarex); hLL1 (EPB-1) (CD74.38, Immunomedics); Galiximab (IDEC-144) (CD80, Biogen); MT293 (TRC093/D93) (cleaved collagen, Tracon); HuLuc63 (CS1, PDL Pharma); ipilimumab (MDX-010) (CTLA4, Brystol Myers Squibb); Tremelimumab (Ticilimumab, CP-675,2) (CTLA4, Pfizer); HGS-ETR1 (Mapatumumab) (DR4 TRAIL-R1 agonist, Human Genome Science/Glaxo Smith Kline); AMG-655 (DR5, Amgen); Apomab (DR5, Genentech); CS-1008 (DR5, Daiichi Sankyo); HGS-ETR2 (lexatumumab) (DR5 TRAIL-R2 agonist, HGS); Cetuximab (Erbitux) (EGFR, Imclone); IMC-11F8, (EGFR, Imclone); Nimotuzumab (EGFR, YM Bio); Panitumumab (Vectabix) (EGFR, Amgen); Zalutumumab (HuMaxEGFr) (EGFR, Genmab); CDX-110 (EGFRvIII, AVANT Immunotherapeutics); adecatumumab (MT201) (Epcam, Merck); edrecolomab (Panorex, 17-1A) (Epcam, Glaxo/Centocor); MORAb-003 (folate receptor a, Morphotech); KW-2871 (ganglioside GD3, Kyowa); MORAb-009 (GP-9, Morphotech); CDX-1307 (MDX-1307) (hCGb, Celldex); Trastuzumab (Herceptin) (HER2, Celldex); Pertuzumab (rhuMAb 2C4) (HER2 (DI), Genentech); apolizumab (HLA-DR beta chain, PDL Pharma); AMG-479 (IGF-1R, Amgen); anti-IGF-1R R1507 (IGF1-R, Roche); CP 751871 (IGF1-R, Pfizer); IMC-A12 (IGF1-R, Imclone); BIIB022 (IGF-1R, Biogen); Mik-beta-1 (IL-2Rb (CD122), Hoffman LaRoche); CNTO 328 (IL6, Centocor); Anti-KIR (1-7F9) (Killer cell Ig-like Receptor (KIR), Novo); Hu3S193 (Lewis (y), Wyeth, Ludwig Institute of Cancer Research); hCBE-11 (LTβR, Biogen); HuHMFG1 (MUC1, Antisoma/NCI); RAV12 (N-linked carbohydrate epitope, Raven); CAL (parathyroid hormone-related protein (PTH-rP), University of California); CT-011 (PD1, CureTech); MDX-1106 (ono-4538) (PD1, Medarex/Ono); MAb CT-011 (PD1, Curetech); IMC-3G3 (PDGFRa, Imclone); bavituximab (phosphatidylserine, Peregrine); huJ591 (PSMA, Cornell Research Foundation); muJ591 (PSMA, Cornell Research Foundation); GC1008 (TGFb (pan) inhibitor (IgG4), Genzyme); Infliximab (Remicade) (TNFa, Centocor); A27.15 (transferrin receptor, Salk Institute, INSERN WO 2005/111082); E2.3 (transferrin receptor, Salk Institute); Bevacizumab (Avastin) (VEGF, Genentech); HuMV833 (VEGF, Tsukuba Research Lab-WO/2000/034337, University of Texas); IMC-18F1 (VEGFR1, Imclone); IMC-1121 (VEGFR2, Imclone).

### B. Construction of DVD Molecules:

[0412] The dual variable domain immunoglobulin (DVD-Ig) molecule is designed such that two different light chain variable domains (VL) from the two different parent monoclonal antibodies are linked in tandem directly or via a short linker by recombinant DNA techniques, followed by the light chain constant domain. Similarly, the heavy chain comprises two different heavy chain variable domains (VH) linked in tandem, followed by the constant domain CH1 and Fc region (FIG. 1A).

[0413] The variable domains can be obtained using recombinant DNA techniques from a parent antibody generated by any one of the methods described herein. In an embodiment, the variable domain is a murine heavy or light chain variable domain. In another embodiment, the variable domain is a CDR grafted or a humanized variable heavy or light chain domain. In an embodiment, the variable domain is a human heavy or light chain variable domain.

[0414] In one embodiment the first and second variable domains are linked directly to each other using recombinant DNA techniques. In another embodiment the variable domains are linked via a linker sequence. In an embodiment, two variable domains are linked. Three or more variable domains may also be linked directly or via a linker sequence. The variable domains may bind the same antigen or may bind different antigens. DVD molecules of the invention may include one immunoglobulin variable domain and one non-immunoglobulin variable domain such as ligand binding domain of a receptor, active domain of an enzyme. DVD molecules may also comprise 2 or more non-Ig domains.

[0415] The linker sequence may be a single amino acid or a polypeptide sequence. In an embodiment, the linker sequences are selected from the group consisting of AKTTPKLEEGEFSEAR (SEQ ID NO: 1); AKTTPKLEEGEFSEARV (SEQ ID NO: 2); AKTTPKLGG (SEQ ID NO: 3); SAKTTPKLGG (SEQ ID NO: 4); SAKTTP (SEQ ID NO: 5); RADAAP (SEQ ID NO: 6); RADAAPTVS (SEQ ID NO: 7); RADAAAAGGPGS (SEQ ID NO: 8); RADAAAA(G₄S)₄ (SEQ ID NO: 9); SAKTTPKLEEGEFSEARV (SEQ ID NO: 10); ADAAP (SEQ ID NO: 11); ADAAPTVSIFPP (SEQ ID NO: 12); TVAAP (SEQ ID NO: 13); TVAAPSVFIFPP (SEQ ID NO: 14); QPKAAP (SEQ ID NO: 15); QPKAAPSVTLFPP (SEQ ID NO: 16); AKTTPP (SEQ ID NO: 17); AKTTPPSVTPLAP (SEQ ID NO: 18); AKTTAP (SEQ ID NO: 19); AKTTAPSVYPLAP (SEQ ID NO: 20); ASTKGP (SEQ ID NO: 21); ASTKGPSVFPLAP (SEQ ID NO: 22), GGGGSGGGGSGGGGS (SEQ ID NO: 23); GENKVEYAPALMALS (SEQ ID NO: 24); GPAKELTPLKEAKVS (SEQ ID NO: 25); GHEAAAVMQVQYPAS (SEQ ID NO: 26). The choice of linker sequences is based on crystal structure analysis of several Fab molecules. There is a natural flexible linkage between the variable domain and the CH1/CL constant domain in Fab or antibody molecular structure. This natural linkage comprises approximately 10-12 amino acid residues, contributed by 4-6 residues from C-terminus of V domain and 4-6 residues from the N-terminus of CL/CH1 domain. DVD Igs of the invention were generated using N-terminal 5-6 amino acid residues, or 11-12 amino acid residues, of CL or CH1 as linker in light chain and heavy chain of DVD-Ig, respectively. The N-terminal residues of CL or CH1 domains, particularly the first 5-6 amino acid residues, adopt a loop conformation without strong secondary structures, therefore can act as flexible linkers between the two variable domains. The N-terminal residues of CL or CH1 domains are natural extension of the variable domains, as they are part of the Ig sequences, therefore minimize to a large extent any immunogenicity potentially arising from the linkers and junctions.

[0416] Other linker sequences may include any sequence of any length of CL/CH1 domain but not all residues of CL/CH1 domain; for example the first 5-12 amino acid residues of the CL/CH1 domains; the light chain linkers can be from Cκ or Cλ; and the heavy chain linkers can be derived from CH1 of any isotypes, including Cγ1, Cγ2, Cγ3, Cγ4, Cα1, Cα2, Cδ, Cε, and Cμ. Linker sequences may also be derived from other proteins such as Ig-like proteins, (e.g. TCR, FcR, KIR); G/S based sequences (e.g G4S repeats); hinge region-derived sequences; and other natural sequences from other proteins.

[0417] In an embodiment a constant domain is linked to the two linked variable domains using recombinant DNA techniques. In an embodiment, sequence comprising linked heavy chain variable domains is linked to a heavy chain constant domain and sequence comprising linked light chain variable domains is linked to a light chain constant domain. In an embodiment, the constant domains are human heavy chain constant domain and human light chain constant domain respectively. In an embodiment, the DVD heavy chain is further linked to an Fc region. The Fc region may be a native sequence Fc region, or a variant Fc region. In another embodiment, the Fc region is a human Fc region. In another embodiment the Fc region includes Fc region from IgG1, IgG2, IgG3, IgG4, IgA, IgM, IgE, or IgD.

[0418] In another embodiment two heavy chain DVD polypeptides and two light chain DVD polypeptides are combined to form a DVD-Ig molecule. Table 2 lists amino acid sequences of VH and VL regions of exemplary antibodies for targets useful for treating disease, e.g., for treating cancer. In an embodiment, the invention provides a DVD comprising at least two of the VH and/or VL regions listed in Table 2, in any orientation.

TABLE 2

List of Amino Acid Sequences of VH and VL
regions of Antibodies for Generating DVD-Igs

| | | | |
|---|---|---|---|
| SEQ | | | |
| ID | ABT | Protein | Sequence |
| No. | Unique ID | region | 1234567890123456789012345678901234567890 |

| | | | |
|---|---|---|---|
| 28 | AB001VH | VH CD20 | QVQLQQPGAELVKPGASVKMSCKASGYTFTSYNMHWVKQT |
| | | | PGRGLEWIGAIYPGNGDTSYNQKFKGKATLTADKSSSTAY |
| | | | MQLSSLTSEDSAVYYCARSTYYGGDWYFNVWGAGTTVTVS |
| | | | A |
| 29 | AB001VL | VL CD20 | QIVLSQSPAILSPSPGEKVTMTCRASSSVSYIHWFQQKPG |
| | | | SSPKPWIYATSNLASGVPVRFSGSGSGTSYSLTISRVEAE |
| | | | DAATYYCQQWTSNPPTFGGGTKLEIKR |
| 30 | AB002VH | VH CD3 (seq. | QVQLQQSGAELARPGASVKMSCKASGYTFTRYTMHWVKQR |
| | | 1) | PGQGLEWIGYINPSRGYTNYNQKFKDKATLTTDKSSSTAY |
| | | | MQLSSLTSEDSAVYYCARYYDDHYCLDYWGQGTTLTVSS |
| 31 | AB002VL | VL CD3 (seq. | QIVLTQSPAIMSASPGEKVTMTCRASSSVSYMNWYQQKSG |
| | | 1) | TSPKRWIYDTSKVASGVPYRFSGSGSGTSYSLTISSMEAE |
| | | | DAATYYCQQWSSNPLTFGSGTKLEINR |
| 32 | AB003VH | VH EGFR | QVQLQESGPGLVKPSETLSLTCTVSGGSVSSGDYYWTWIR |
| | | (seq. 1) | QSPGKGLEWIGHIYYSGNTNYNPSLKSRLTISIDTSKTQF |
| | | | SLKLSSVTAADTAIYYCVRDRVTGAFDIWGQGTMVTVSS |
| 33 | AB003VL | VL EGFR | DIQMTQSPSSLSASVGDRVTITCQASQDISNYLNWYQQKP |
| | | (seq. 1) | GKAPKLLIYDASNLETGVPSRFSGSGSGTDFTFTISSLQP |
| | | | EDIATYFCQHFDHLPLAFGGGTKVEIKR |
| 34 | AB004VH | VH HER2 | EVQLVESGGGLVQPGGSLRLSCAASGFNIKDTYIHWVRQA |
| | | (seq. 1) | PGKGLEWVARIYPTNGYTRYADSVKGRFTISADTSKNTAY |
| | | | LQMNSLRAEDTAVYYCSRWGGDGFYAMDYWGQGTLVTVSS |
| 35 | AB004VL | VL HER2 | DIQMTQSPSSLSASVGDRVTITCRASQDVNTAVAWYQQKP |
| | | (seq. 1) | GKAPKLLIYSASFLYSGVPSRFSGSRSGTDFTLTISSLQP |
| | | | EDFATYYCQQHYTTPPTFGQGTKVEIKR |
| 36 | AB005VH | VH RON (seq. | EVQLVQSGGGLVKPGGSLRLSCAASGFTFSSYAMHWVRQA |
| | | 1) | PGKGLEWVAVISYDGSNKYYADSVKGRFTISRDNSKNTLY |
| | | | LQMNSLRAEDTAVYYCARFSGWPNNYYYYGMDVWGQGTTV |
| | | | TVSS |
| 37 | AB005VL | VL RON (seq. | DVVMTQSPLSLPVTPGEPASISCRSSQSLLHSNGFNYVDW |
| | | 1) | YLQKPGQSPHLLIYFGSYRASGVPDRFSGSGSGTDFTLKI |
| | | | SRVEAEDVGVYYCMQALQTPPWTFGQGTKVEIRR |
| 38 | AB006VH | VH CD-19 | QVQLQQSGAELVRPGSSVKISCKASGYAFSSYWMNWVKQR |
| | | (seq. 1) | PGQGLEWIGQIWPGDGDTNYNGKFKGKATLTADESSSTAY |
| | | | MQLSSLASEDSAVYFCARRETTTVGRYYYAMDYWGQGTSV |
| | | | TVSS |
| 39 | AB006VL | VL CD-19 | DILLTQTPASLAVSLGQRATISCKASQSVDYDGDSYLNWY |
| | | (seq. 1) | QQIPGQPPKLLIYDASNLVSGIPPRFSGSGSGTDFTLNIH |
| | | | PVEKVDAATYHCQQSTEDPWTFGGGTKLEIKR |
| 40 | AB007VH | VH CD-80 | QVQLQESGPGLVKPSETLSLTCAVSGGSISGGYGWGWIRQ |
| | | | PPGKGLEWIGSFYSSSGNTYYNPSLKSQVTISTDTSKNQF |
| | | | SLKLNSMTAADTAVYYCVRDRLFSVVGMVYNNWFDVWGPG |
| | | | VLVTVSS |
| 41 | AB007VL | VL CD-80 | ESALTQPPSVSGAPGQKVTISCTGSTSNIGGYDLHWYQQL |
| | | | PGTAPKLLIYDINKRPSGISDRFSGSKSGTAASLAITGLQ |
| | | | TEDEADYYCQSYDSSLNAQVFGGGTRLTVLG |
| 42 | AB008VH | VH CD-22 | QVQLVQSGAEVKKPGSSVKVSCKASGYTFTSYWLHWVRQA |
| | | | PGQGLEWIGYINPRNDYTEYNQNFKDKATITADESTNTAY |
| | | | MELSSLRSEDTAFYFCARRDITTFYWGQGTTVTVSS |
| 43 | AB008VL | VL CD-22 | DIQLTQSPSSLSASVGDRVTMSCKSSQSVLYSANHKNYLA |
| | | | WYQQKPGKAPKLLIYWASTRESGVPSRFSGSGSGTDFTFT |
| | | | ISSLQPEDIATYYCHQYLSSWTFGGGTKLEIKR |
| 44 | AB009VH | VH CD-40 | QVQLVESGGGVVQPGRSLRLSCAASGFTFSSYGMHWVRQA |
| | | | PGKGLEWVAVISYEESNRYHADSVKGRFTISRDNSKITLY |
| | | | LQMNSLRTEDTAVYYCARDGGIAAPGPDYWGQGTLVTVSS |
| 45 | AB009VL | VL CD-40 | DIVMTQSPLSLTVTPGEPASISCRSSQSLLYSNGYNYLDW |
| | | | YLQKPGQSPQVLISLGSNRASGVPDRFSGSGSGTDFTLKI |
| | | | SRVEAEDVGVYYCMQARQTPFTFGPGTKVDIRR |
| 46 | AB010VH | VH IGF1,2 | QVQLVQSGAEVKKPGASVKVSCKASGYTFTSYDINWVRQA |
| | | | TGQGLEWMGWMNPNSGNTGYAQKFQGRVTMTRNTSISTAY |
| | | | MELSSLRSEDTAVYYCARDPYYYYYGMDVWGQGTTVTVSS |
| 47 | AB010VL | VL IGF1,2 | QSVLTQPPSVSAAPGQKVTISCSGSSSNIENNHVSWYQQL |
| | | | PGTAPKLLIYDNNKRPSGIPDRFSGSKSGTSATLGITGLQ |
| | | | TGDEADYYCETWDTSLSAGRVFGGGTKLTVLG |
| 48 | AB011VH | VH IGF1R | EVQLLESGGGLVQPGGSLRLSCTASGFTFSSYAMNWVRQA |
| | | (seq. 1) | PGKGLEWVSAISGSGGTTFYADSVKGRFTISRDNSRTTLY |
| | | | LQMNSLRAEDTAVYYCAKDLGWSDSYYYYYGMDVWGQGTT |
| | | | VTVSS |
| 49 | AB011VL | VL IGF1R | DIQMTQFPSSLSASVGDRVTITCRASQGIRNDLGWYQQKP |
| | | (seq. 1) | GKAPKRLIYAASRLHRGVPSRFSGSGSGTEFTLTISSLQP |
| | | | EDFATYYCLQHNSYPCSFGQGTKLEIKR |
| 50 | AB012VH | VH HGF (seq. | QVQLVESGGGLVKPGGSLRLSCAASGFTFSDYYMSWIRQA |
| | | 1) | PGKGLEWVSYISSSGSTIYYADSVKGRFTISRDNAKNSLY |
| | | | LQMNSLRAEDTAVYYCARDEYNSGWYVLFDYWGQGTLVTV |
| | | | SS |
| 51 | AB012VL | VL HGF (seq. | DIQMTQSPSSVSASVGDRVTITCRASQGISSWLAWYQQKP |
| | | 1) | GKAPNLLIYEASSLQSGVPSRFGGSGSGTDFTLTISSLQP |
| | | | EDFATYYCQQANGFPWTFGQGTKVEIKR |
| 52 | AB013VH | VH c-MET | QVQLQQSGPELVRPGASVKWSCPASGYTFTSYWLHWVKKQ |
| | | | RPGQGLEWIGMIDPSNSDTRFNPPNFKDKATLNVDRSSNT |
| | | | AYNLLSSLTSADSAVYYCATYGSYVSPLDYWGQGTSVYVS |
| | | | S |
| 53 | AB013VL | VL c-MET | DIMMSQSPSSLTVSVGEKVTVSCKSSQSLLVTSSQKNYLA |
| | | | WYQQKPQQSPKLLIYWASTRESGVPDRFTGSGSGTDFTLT |
| | | | ITSVKADDLAVYYCQQYYAYPWTFGDGTKLEIKR |
| 54 | AB014VH | VH VEGF | EVQLVESGGGLVQPGGSLRLSCAASGYTFTNYGMNWVRQA |
| | | (seq. 1) | PGKGLEWVGWINTYTGEPTYAADFKRRFTFSLDTSKSTAY |
| | | | LQMNSLRAEDTAVYYCAKYPHYYGSSHWYFDVWGQGTLVT |
| | | | VSS |
| 55 | AB014VL | VL VEGF | DIQMTQSPSSLSASVGDRVTITCSASQDISNYLNWYQQKP |
| | | (seq. 1) | GKAPKVLIYFTSSLHSGVPSRFSGSGSGTDFTLTISSLQP |
| | | | EDFATYYCQQYSTVPWTFGQGTKVEIKR |
| 56 | AB015VH | VH DLL-4 | EVQLVESGGGLVQPGGSLRLSCAASGFTFTDNWISWVRQA |
| | | (seq. 1) | PGKGLEWVGYISPNSGFTYYADSVKGRFTISADTSKNTAY |
| | | | LQMNSLRAEDTAVYYCARDNFGGYFDYWGQGTLVTVSS |
| 57 | AB015VL | VL DLL-4 | DIQMTQSPSSLSASVGDRVTITCRASQDVSTAVAWYQQKP |
| | | (seq. 1) | GKAPKLLIYSASFLYSGVPSRFSGSGSGTDFTLTISSLQP |
| | | | EDFATTYYCQQSYTGTVTFGQGTKVEIKR |
| 58 | AB016VH | VH NRP1 | EVQLVESGGGLVQPGGSLRLSCAASGFSFSSEPISWVRQA |
| | | (seq. 1) | PGKGLEWVSSITGKNGYTYYADSVKGRFTISADTSKNTAY |
| | | | LQMNSLRAEDTAVYYCARWGKKVYGMDVWGQGTLVTVSS |
| 59 | AB016VL | VL NRP1 | DIQMTQSPSSLSASVGDRVTITCRASQSISSYLAWYQQKP |
| | | (seq. 1) | GKAPKLLIYGASSRASGVPSRFSGSGSGTDFTLTISSLQP |
| | | | EDFATYYCQQYMSVPITFGQGTKVEIKR |
| 60 | AB033VH | VH EGFR | QVQLKQSGPGLVQPSQSLSITCTVSGFSLTNYGVHWVRQS |
| | | (seq. 2) | PGKGLEWLGVIWSGGNTDYNTPFTSRLSINKDNSKSQVFF |
| | | | KMNSLQSNDTAIYYCARALTYYDYEFAYWGQGTLVTVSA |
| 61 | AB033VL | VL EGFR | DILLTQSPVILSVSPGERVSFSCRASQSIGTNIHWYQQRT |
| | | (seq. 2) | NGSPRLLIKYASESISGIPSRFSGSGSGTDFTLSINSVES |
| | | | EDIADYYCQQNNNWPTTFGAGTKLELKR |
| 62 | AB034VH | VH RON (seq. | QVQLQESGPGLVKPSEILSLTCTVSGGSISSHYWSWVRQP |
| | | 2) | PGKGLEWIGYIYYSGSTNYNPSLKSRVTISVDTSKNQFSL |
| | | | NLSSVTAADTAVYYCARIPNYYDRSGYYPGYWYFDLWGRG |
| | | | TLVTVSS |
| 63 | AB034VL | VL RON (seq. | QAVLTQPSSLSAPPGASASLTCTLRSGFNVDSYRISWYQQ |
| | | 2) | KPGSPPQYLLRYKSDSDKQQGSGVPSRFSGSKDASANAGI |
| | | | LLISGLQSEDEADYYCMIWHSSAWVFGGGTKLTVLR |
| 64 | AB035VH | VH NRP1 | EVQLVESGGGLVQPGGSLRLSCAASGFTFSSYAMSWVRQA |
| | | (seq. 2) | PGKGLEWVSQISPAGGYTNYADSVKGRFTISADTSKNTAY |
| | | | LQMNSLRAEDTAVYYCARELPYYRMSKVMDVQGQGTLVTV |
| | | | SS |
| 65 | AB035VL | VL NRP1 | DIQMTQSPSSLSASVGDRVTITCRASQYFSSYLAWYQQKP |
| | | (seq. 2) | GKAPKLLIYGASSRASGVPSRFSGSGSGTDFTLTISSLQP |
| | | | EDFATYYCQQYLGSPPTFGQGTKVEIKR |
| 66 | AB039VH | VH CD3 (seq. | QVQLQQSGAELARPGASVKMSCKASGYTFTRYTMHWVKQR |
| | | 2) | PGQGLEWIGYINPSRGYTNYNQKFKDKATLTTDKSSSTAY |
| | | | MQLSSLTSEDSAVYYCARYYDDHYCLDYWGQGTTLTVSS |
| 67 | AB039VL | VL CD3 (seq. | QIVLTQSPAIMSASPGEKVTMTCSASSSVSYMNWYQQKSG |
| | | 2) | TSPKRWIYDTSKLASGVPAHFRGSGSGTSYSLTISGMEAE |
| | | | DAATYYCQQWSSNPFTFGSGTKLEINR |
| 68 | AB047VH | VH PLGF | QVQLQQSGAELVKPGASVKISCKASGYTFTDYYINWVKLA |
| | | (seq. 1) | PGQGLEWIGWIYPGSGNTKYNEKFKGKATLTIDTSSSTAY |
| | | | MQLSSLTSEDTAVYFCVRDSPFFDYWGQGTLLTVSS |
| 69 | AB047VL | VL PLGF | DIVLTQSPDSLAVSLGERVTMNCKSSQSLLNSGMRKSFLA |
| | | (seq. 1) | WYQQKPGQSPKLLIYWASTRESGVPDRFTGSGSGTDFTLT |
| | | | ISSVQAEDVAVYYCKQSYHLFTFGSGTKLEIKR |
| 70 | AB062VH | VH ErbB3 | QVQLQQWGAGLLKPSETLSLTCAVYGGSFSGYYWSWIRQP |
| | | (seq. 1) | PGKGLEWIGEINHSGSTNYNPSLKSRVTISVETSKNQFSL |
| | | | KLSSVTAADTAVYYCARDKWTWYFDLWGRGTLVTVSS |
| 71 | AB062VL | VL ErbB3 | DIEMTQSPDSLAVSLGERATINCRSSQSVLYSSSNRNYLA |
| | | (seq. 1) | WYQQNPGQPPKLLIYWASTRESGVPDRFSGSGSGTDFTLT |
| | | | ISSLQAEDVAVYYCQQYYSTPRTFGQGTKVEIKR |
| 72 | AB063VH | VH ErbB3 | EVQLVESGGGLVQPGGSLRLSCAASGFTFSIYSMNWVRQA |
| | | (seq. 2) | PGKGLEWVSYISSSSSTIYYADSVKGRFTISRDNAKNSLY |
| | | | LQMNSLRDEDTAVYYCARDRGDFDAFDIWGQGTMVTVSS |
| 73 | AB063VL | VL ErbB3 | DIQMTQSPSSLSASVGDRVTITCQASQDITNYLNWYQQKP |
| | | (seq. 2) | GKAPKLLIYDASNLETGVPSRFSGSGSGTDFTFTISSLQP |
| | | | EDIATYNCQQCENFPITFGQGTRLEIKR |
| 74 | AB067VH | VH ErbB3 | EVQLLESGGGLVQPGGSLRLSCAASGFTFSHYVMAWVRQA |
| | | (seq. 3) | PGKGLEWVSSISSSGGWTLYADSVKGRFTISRDNSKNTLY |
| | | | LQMNSLRAEDTAVYYCTRGLKMATIFDYWGQGTLVTVSS |
| 75 | AB067VL | VL ErbB3 | QSALTQPASVSGSPGQSITISCTGTSSDVGSYNVVSWYQQ |
| | | (seq. 3) | HPGKAPKLIIYEVSQRPSGVSNRFSGSKSGNTASLTISGL |
| | | | QTEDEADYYCCSYAGSSIFVIFGGGTKVTVLG |
| 76 | AB069VH | VH DLL4 | QVQLVQSGAEVKKPGASVKISCKASGYSFTAYYIHWVKQA |
| | | (seq. 2) | PGQGLEWIGYISSYNGATNYNQKFKGRVTFTTDTSTSTAY |
| | | | MELRSLRSDDTAVYYCARDYDYDVGMDYWGQGTLVTVSS |
| 77 | AB069VL | VL DLL4 | DIVMTQSPDSLAVSLGERATISCRASESVDNYGISFMKWF |
| | | (seq. 2) | QQKPGQPPKLLIYAASNQGSGVPDRFSGSGSGTDFTLTIS |
| | | | SLQAEDVAVYYCQQSKEVPWTFGGGTKVEIKR |
| 78 | AB070VH | VH VEGF | EVQLVESGGGLVQPGGSLRLSCAASGFTISDYWIHWVRQA |
| | | (seq. 2) | PGKGLEWVAGITPAGGYTYYADSVKGRFTISADTSKNTAY |
| | | | LQMNSLRAEDTAVYYCARFVFFLPYAMDYWGQGTLVTVSS |
| 79 | AB070VL | VL VEGF | DIQMTQSPSSLSASVGDRVTITCRASQDVSTAVAWYQQKP |
| | | (seq. 2) | GKAPKLLIYSASFLYSGVPSRFSGSGSGTDFTLTISSLQP |
| | | | EDFATYYCQQSYTTPPTFGQGTKVEIKR |
| 80 | AB071VH | VH VEGF | EVQLVESGGGLVQPGGSLRLSCAASGFTINASWIHWVRQA |
| | | (seq. 3) | PGKGLEWVGAIYPYSGYTNYADSVKGRFTISADTSKNTAY |
| | | | LQMNSLRAEDTAVYYCARWGHSTSPWAMDYWGQGTLVTVS |
| | | | S |
| 81 | AB071VL | VL VEGF | DIQMTQSPSSLSASVGDRVTITCRASQVIRRSLAWYQQKP |
| | | (seq. 3) | GKAPKLLIYAASNLASGVPSRFSGSGSGTDFTLTISSLQP |
| | | | EDFATYYCQQSNTSPLTFGQGTKVEIKR |
| 82 | AB072VH | VH DLL4 | EVQLQQSGPELVKPGASVKMSCKASGYTFTSYVINWVKQK |
| | | (seq. 3) | PGQGLEWIGLINPYNDGTKYNEKFKVKATLTSDKSSSTAY |
| | | | MELSSLTSEDSAVYYCASYYYGSRYYFDYWGQGTTLTVSS |
| 83 | AB072VL | VL DLL4 | DIQMTQSSSYLSVSLGGRVTITCKASDHINNWLAWYQQKP |
| | | (seq. 3) | GNAPRLLISGATSLETGVPSRFSGSGSGKDYTLSITSLQT |
| | | | EDVATYYCQQYWSIPLTFGAGTKLELKR |
| 84 | AB073VH | VH DLL4 | EVQLQQSGPELEKPGASVKISCKASGYSFTGYNMNWVKQS |
| | | (seq. 4) | NGKSLEWIGNIDPYFGGTNYNQKFKGKATLTVDKSSSTAY |
| | | | MQLKSLTSEDSAVYYCARNYDYDGGCFDYWGQGTTLTVSS |
| 85 | AB073VL | VL DLL4 | QAVVTQESALTTSPGETVTLTCRSSTGAVTTSNYANWVQE |
| | | (seq. 4) | KPDHLFTGLIGGTNNRAPGVPARFSGSLIGDKAALTITGA |
| | | | QTEDEAIYFCALWYSNHWVFGGGTKLTVLG |
| 86 | AB074VH | VH PLGF | QVQLKQSGPGLVQPSQSLSITCTVSGFSLTTYGIHWVRQS |
| | | (seq. 2) | PGKGLEWLGVMWSGGDTDYDAAFISRLSISKDNSKSQVFF |
| | | | KMNSLQANDTGIYYCARYRFYGMDYWGQGTSVTVSS |
| 87 | AB074VL | VL PLGF | AIQMTQSSSSFSVSLGDRVTITCKASEDIYNRFAWYQQKP |
| | | (seq. 2) | GNAPRLLISGAASLEAGVPSRFSGSGSGQDYTLSITSLQT |
| | | | EDVATYYCQQYWSTPWTFGGGTKLEIKR |
| 88 | AB075VH | VH IGF1R | EVQLVQSGAEVKKPGSSVKVSCKASGGTFSSYAISWVRQA |
| | | (seq. 2) | PGQGLEWMGGIIPIFGTANYAQKFQGRVTITADKSTSTAY |
| | | | MELSSLRSEDTAVYYCARAPLRFLEWSTQDHYYYYYMDVW |
| | | | GKGTTVTVSS |
| 89 | AB075VL | VL IGF1R | SSELTQDPAVSVALGQTVRITCQGDSLRSYYATWYQQKPG |
| | | (seq. 2) | QAPILVIYGENKRPSGIPDRFSGSSSGNTASLTITGAQAE |
| | | | DEADYYCKSRDGSGQHLVFGGGTKLTVLG |
| 90 | AB077VH | VH IGF1R | EVQLVQSGGGLVKPGGSLRLSCAASGFTFSSFAMHWVRQA |
| | | (seq. 3) | PGKGLEWISVIDTRGATYYADSVKGRFTISRDNAKNSLYL |
| | | | QMNSLRAEDTAVYYCARLGNFYYGMDVWGQGTTVTVSS |
| 91 | AB077VL | VL IGF1R | EIVLTQSPGTLSVSPGERATLSCRASQSIGSSLHWYQQKP |
| | | (seq. 3) | GQAPRLLIKYASQSLSGIPDRFSGSGSGTDFTLTISRLEP |
| | | | EDFAVYYCHQSSRLPHTFGQGTKVEIKR |
| 92 | AB079VH | VH HGF (seq. | EVQLVQSGAEVKKPGESLKISCKGSGYSFTTYWMHWVRQM |
| | | 2) | PGKGLEWMGEINPTNGHTNYNPSFQGQVTISADKSISTAY |
| | | | LQWSSLKASDTAMYYCARNYVGSIFDYWGQGTLVTVSS |
| 93 | AB079VL | VL HGF (seq. | DIQMTQSPSSLSASVGDRVTITCKASENVVSYVSWYQQKP |
| | | 2) | GKAPKLLIYGASNRNTGVPSRFSGSGSGTDFTLTISSLQP |
| | | | EDFATYYCGQSYNYPYTFGQGTKLEIKR |
| 94 | AB080VH | VH HER2 | EVQLVESGGGLVQPGGSLRLSCAASGFTFTDYTMDWVRQA |
| | | (seq. 2) | PGKGLEWVADVNPNSGGSIYNQRFKGRFTLSVDRSKNTLY |
| | | | LQMNSLRAEDTAVYYCARNLGPSFYFDYWGQGTLVTVSS |
| 95 | AB080VL | VL HER2 | DIQMTQSPSSLSASVGDRVTITCKASQDVSIGVAWYQQKP |
| | | (seq. 2) | GKAPKLLIYSASYRYTGVPSRFSGSGSGTDFTLTISSLQP |
| | | | EDFATYYCQQYYIYPYTFGQGTKVEIKR |
| 96 | AB107VH | VH CD3 (seq. | EVQLVESGGGLVQPGGSLRLSCAASGYSFTGYTMNWVRQA |
| | | 3) | PGKGLEWVALINPYKGVSTYNQKFKDRFTISVDKSKNTAY |
| | | | LQMNSLRAEDTAVYYCARSGYYGDSDWYFDVWGQGTLVTV |
| | | | SS |
| 97 | AB107VL | VL CD3 (seq. | DIQMTQSPSSLSASVGDRVTITCRASQDIRNYLNWYQQKP |
| | | 3) | GKAPKLLIYYTSRLESGVPSRFSGSGSGTDYTLTISSLQP |
| | | | EDFATYYCQQGNTLPWTFGQGTKVEIKR |
| 98 | AB108VH | VH CD3 (seq. | EVQLLESGGGLVQPGGSLKLSCAASGFTFNTYAMNWVRQA |
| | | 4) | PGKGLEWVARIRSKYNNYATYYADSVKDRFTISRDDSKNT |
| | | | AYLQMNNLKTEDTAVYYCVRHGNFGNSYVSWFAYWGQGTL |
| | | | VTVSS |
| 99 | AB108VL | VL CD3 (seq. | ELVVTQEPSLTVSPGGTVTLTCRSSTGAVTTSNYANWVQQ |
| | | 4) | KPGQAPRGLIGGTNKRAPGTPARFSGSLLGGKAALTLSGV |
| | | | QPEDEAEYYCALWYSNLWVFGGGTKLTVLG |
| 100 | AB110VH | VH mCD3 | EVQLVESGGGLVQPGKSLKLSCEASGFTFSGYGMHWVRQA |
| | | | PGRGLESVAYITSSSINIKYADAVKGRFTVSRDNAKNLLF |
| | | | LQMNILKSEDTAMYYCARFDWDKNYWGQGTMVTVSS |
| 101 | AB110VL | VL mCD3 | DIQMTQSPSSLPASLGDRVTINCQASQDISNYLNWYQQKP |
| | | | GKAPKLLIYYTNKLADGVPSRFSGSGSGRDSSFTISSLES |
| | | | EDIGSYYCQQYYNYPWTFGPGTKLEIKR |
| 102 | AB111VH | VH CD19 | EVKLQESGPGLVAPSQSLSVTCTVSGVSLPDYGVSWIRQP |
| | | (seq. 2) | PRKGLEWLGVIWGSEGTTYYNSALKSRLTIIKDNSKSQVP |
| | | | LKMNSLQTDDTAIYYCAKHYYYGGSYAMDYWGQGTSVTVS |
| | | | S |
| 103 | AB111VL | VL CD19 | DIQMTQTTSSLSASLGDRVTISCRASQDISKTLNWYQQKP |
| | | (seq. 2) | DGTVKLLIYHTSRLHSGVPSRFSGSGSGTDYSLTISNLEQ |
| | | | EDIATYFCQQGNTLPYTFGGGTKLEITR |
| 104 | AB112VH | VH CD19 | EVQLQESGPELVKPGASVKISCKASGYAFSSSWMNWVIQR |
| | | (seq. 3) | PGQGLEWIGRIYPGDGDTNYNGKFKGKATLTADKSSSTAY |
| | | | MQLSSLTSVDSAVYFCARSGFITTVLDFDYWGQGTTLTVS |
| | | | S |
| 105 | AB112VL | VL CD19 | DIVLTQSPTSLAVSLGQRATISCRASESVDTFGISFMNWF |
| | | (seq. 3) | QQKPGQPPKLLIHAASNQGSGVPSRFSGSGSGTDFSLNIH |
| | | | PMEEDDSAMYFCQQSKEVPFTFGSGTKLEIKR |
| 106 | AB114VH | VH mCD19 | EVQLQQSGAELVRPGTSVKLSCKVSGDTITFYYMHFVKQR |
| | | | PGQGLEWIGRIDPEDESTKYSEKFKNKATLTADTSSNTAY |
| | | | LKLSSLTSEDTATYFCIYGGYYFDYWGQGVMVTVSS |
| 107 | AB114VL | VL mCD19 | DIQMTQSPASLSTSLGETVTIQCQASEDIYSGLAWYQQKP |
| | | | GKSPQLLIYGASDLQDGVPSRFSGSGSGTQYSLKITSMQT |
| | | | EDEGVYFCQQGLTYPRTFGGGTKLELKR |

[0419] Detailed description of specific DVD-Ig molecules capable of binding specific targets, and methods of making the same, is provided in the Examples section below.

### C. Production of DVD Proteins

[0420] Binding proteins of the present invention may be produced by any of a number of techniques known in the art. For example, expression from host cells, wherein expression vector(s) encoding the DVD heavy and DVD light chains is (are) transfected into a host cell by standard techniques. The various forms of the term “transfection” are intended to encompass a wide variety of techniques commonly used for the introduction of exogenous DNA into a prokaryotic or eukaryotic host cell, e.g., electroporation, calcium-phosphate precipitation, DEAE-dextran transfection and the like. Although it is possible to express the DVD proteins of the invention in either prokaryotic or eukaryotic host cells, DVD proteins are expressed in eukaryotic cells, for example, mammalian host cells, because such eukaryotic cells (and in particular mammalian cells) are more likely than prokaryotic cells to assemble and secrete a properly folded and immunologically active DVD protein.

[0421] Exemplary mammalian host cells for expressing the recombinant antibodies of the invention include Chinese Hamster Ovary (CHO cells) (including dhfr− CHO cells, described in Urlaub and Chasin, (1980) Proc. Natl. Acad. Sci. USA 77:4216-4220, used with a DHFR selectable marker, e.g., as described in R. J. Kaufman and P. A. Sharp (1982) Mol. Biol. 159:601-621), NSO myeloma cells, COS cells, SP2 and PER.C6 cells. When recombinant expression vectors encoding DVD proteins are introduced into mammalian host cells, the DVD proteins are produced by culturing the host cells for a period of time sufficient to allow for expression of the DVD proteins in the host cells or secretion of the DVD proteins into the culture medium in which the host cells are grown. DVD proteins can be recovered from the culture medium using standard protein purification methods.

[0422] In an exemplary system for recombinant expression of DVD proteins of the invention, a recombinant expression vector encoding both the DVD heavy chain and the DVD light chain is introduced into dhfr− CHO cells by calcium phosphate-mediated transfection. Within the recombinant expression vector, the DVD heavy and light chain genes are each operatively linked to CMV enhancer/AdMLP promoter regulatory elements to drive high levels of transcription of the genes. The recombinant expression vector also carries a DHFR gene, which allows for selection of CHO cells that have been transfected with the vector using methotrexate selection/amplification. The selected transformant host cells are cultured to allow for expression of the DVD heavy and light chains and intact DVD protein is recovered from the culture medium. Standard molecular biology techniques are used to prepare the recombinant expression vector, transfect the host cells, select for transformants, culture the host cells and recover the DVD protein from the culture medium. Still further the invention provides a method of synthesizing a DVD protein of the invention by culturing a host cell of the invention in a suitable culture medium until a DVD protein of the invention is synthesized. The method can further comprise isolating the DVD protein from the culture medium.

[0423] An important feature of DVD-Ig is that it can be produced and purified in a similar way as a conventional antibody. The production of DVD-Ig results in a homogeneous, single major product with desired dual-specific activity, without any sequence modification of the constant region or chemical modifications of any kind. Other previously described methods to generate “bi-specific”, “multi-specific”, and “multi-specific multivalent” full length binding proteins do not lead to a single primary product but instead lead to the intracellular or secreted production of a mixture of assembled inactive, mono-specific, multi-specific, multivalent, full length binding proteins, and multivalent full length binding proteins with combination of different binding sites. As an example, based on the design described by Miller and Presta (PCT publication WO2001/077342(A1), there are 16 possible combinations of heavy and light chains. Consequently only 6.25% of protein is likely to be in the desired active form, and not as a single major product or single primary product compared to the other 15 possible combinations. Separation of the desired, fully active forms of the protein from inactive and partially active forms of the protein using standard chromatography techniques, typically used in large scale manufacturing, is yet to be demonstrated.

[0424] Surprisingly the design of the “dual-specific multivalent full length binding proteins” of the present invention leads to a dual variable domain light chain and a dual variable domain heavy chain which assemble primarily to the desired “dual-specific multivalent full length binding proteins”.

[0425] At least 50%, at least 75% and at least 90% of the assembled, and expressed dual variable domain immunoglobulin molecules are the desired dual-specific tetravalent protein. This aspect of the invention particularly enhances the commercial utility of the invention. Therefore, the present invention includes a method to express a dual variable domain light chain and a dual variable domain heavy chain in a single cell leading to a single primary product of a “dual-specific tetravalent full length binding protein”.

[0426] The present invention provides a methods of expressing a dual variable domain light chain and a dual variable domain heavy chain in a single cell leading to a “primary product” of a “dual-specific tetravalent full length binding protein”, where the “primary product” is more than 50% of all assembled protein, comprising a dual variable domain light chain and a dual variable domain heavy chain.

[0427] The present invention provides methods of expressing a dual variable domain light chain and a dual variable domain heavy chain in a single cell leading to a single “primary product” of a “dual-specific tetravalent full length binding protein”, where the “primary product” is more than 75% of all assembled protein, comprising a dual variable domain light chain and a dual variable domain heavy chain.

[0428] The present invention provides methods of expressing a dual variable domain light chain and a dual variable domain heavy chain in a single cell leading to a single “primary product” of a “dual-specific tetravalent full length binding protein”, where the “primary product” is more than 90% of all assembled protein, comprising a dual variable domain light chain and a dual variable domain heavy chain.

### II. Derivatized DVD Binding Proteins:

[0429] One embodiment provides a labeled binding protein wherein the binding protein of the invention is derivatized or linked to another functional molecule (e.g., another peptide or protein). For example, a labeled binding protein of the invention can be derived by functionally linking an binding protein of the invention (by chemical coupling, genetic fusion, noncovalent association or otherwise) to one or more other molecular entities, such as another antibody (e.g., a bispecific antibody or a diabody), a detectable agent, a cytotoxic agent, a pharmaceutical agent, and/or a protein or peptide that can mediate association of the binding protein with another molecule (such as a streptavidin core region or a polyhistidine tag).

[0430] Useful detectable agents with which a binding protein of the invention may be derivatized include fluorescent compounds. Exemplary fluorescent detectable agents include fluorescein, fluorescein isothiocyanate, rhodamine, 5-dimethylamine-1-napthalenesulfonyl chloride, phycoerythrin and the like. A binding protein may also be derivatized with detectable enzymes, such as alkaline phosphatase, horseradish peroxidase, glucose oxidase and the like. When a binding protein is derivatized with a detectable enzyme, it is detected by adding additional reagents that the enzyme uses to produce a detectable reaction product. For example, when the detectable agent horseradish peroxidase is present, the addition of hydrogen peroxide and diaminobenzidine leads to a colored reaction product, which is detectable. A binding protein may also be derivatized with biotin, and detected through indirect measurement of avidin or streptavidin binding.

[0431] Another embodiment of the invention provides a crystallized binding protein and formulations and compositions comprising such crystals. In one embodiment the crystallized binding protein has a greater half-life in vivo than the soluble counterpart of the binding protein. In another embodiment the binding protein retains biological activity after crystallization.

[0432] Crystallized binding protein of the invention may be produced according to methods known in the art and as disclosed in WO 02072636, incorporated herein by reference.

[0433] Another embodiment of the invention provides a glycosylated binding protein wherein the antibody or antigen-binding portion thereof comprises one or more carbohydrate residues. Nascent in vivo protein production may undergo further processing, known as post-translational modification. In particular, sugar (glycosyl) residues may be added enzymatically, a process known as glycosylation. The resulting proteins bearing covalently linked oligosaccharide side chains are known as glycosylated proteins or glycoproteins. Antibodies are glycoproteins with one or more carbohydrate residues in the Fc domain, as well as the variable domain. Carbohydrate residues in the Fc domain have important effect on the effector function of the Fc domain, with minimal effect on antigen binding or half-life of the antibody (R. Jefferis, Biotechnol. Prog. 21 (2005), pp. 11-16). In contrast, glycosylation of the variable domain may have an effect on the antigen binding activity of the antibody. Glycosylation in the variable domain may have a negative effect on antibody binding affinity, likely due to steric hindrance (Co, M. S., et al., Mol. Immunol. (1993) 30:1361-1367), or result in increased affinity for the antigen (Wallick, S. C., et al., Exp. Med. (1988) 168:1099-1109; Wright, A., et al., EMBO J. (1991) 10:2717 2723).

[0434] One aspect of the present invention is directed to generating glycosylation site mutants in which the O- or N-linked glycosylation site of the binding protein has been mutated. One skilled in the art can generate such mutants using standard well-known technologies. Glycosylation site mutants that retain the biological activity but have increased or decreased binding activity are another object of the present invention.

[0435] In still another embodiment, the glycosylation of the antibody or antigen-binding portion of the invention is modified. For example, an aglycoslated antibody can be made (i.e., the antibody lacks glycosylation). Glycosylation can be altered to, for example, increase the affinity of the antibody for antigen. Such carbohydrate modifications can be accomplished by, for example, altering one or more sites of glycosylation within the antibody sequence. For example, one or more amino acid substitutions can be made that result in elimination of one or more variable region glycosylation sites to thereby eliminate glycosylation at that site. Such aglycosylation may increase the affinity of the antibody for antigen. Such an approach is described in further detail in PCT Publication WO2003016466A2, and U.S. Pat. Nos. 5,714,350 and 6,350,861, each of which is incorporated herein by reference in its entirety.

[0436] Additionally or alternatively, a modified binding protein of the invention can be made that has an altered type of glycosylation, such as a hypofucosylated antibody having reduced amounts of fucosyl residues (see Kanda, Yutaka et al., Journal of Biotechnology (2007), 130(3), 300-310.) or an antibody having increased bisecting GlcNAc structures. Such altered glycosylation patterns have been demonstrated to increase the ADCC ability of antibodies. Such carbohydrate modifications can be accomplished by, for example, expressing the antibody in a host cell with altered glycosylation machinery. Cells with altered glycosylation machinery have been described in the art and can be used as host cells in which to express recombinant antibodies of the invention to thereby produce an antibody with altered glycosylation. See, for example, Shields, R. L. et al. (2002) J. Biol. Chem. 277:26733-26740; Umana et al. (1999) Nat. Biotech. 17:176-1, as well as, European Patent No: EP 1,176,195; PCT Publications WO 03/035835; WO 99/54342 80, each of which is incorporated herein by reference in its entirety.

[0437] Protein glycosylation depends on the amino acid sequence of the protein of interest, as well as the host cell in which the protein is expressed. Different organisms may produce different glycosylation enzymes (eg., glycosyltransferases and glycosidases), and have different substrates (nucleotide sugars) available. Due to such factors, protein glycosylation pattern, and composition of glycosyl residues, may differ depending on the host system in which the particular protein is expressed. Glycosyl residues useful in the invention may include, but are not limited to, glucose, galactose, mannose, fucose, n-acetylglucosamine and sialic acid. In an embodiment, the glycosylated binding protein comprises glycosyl residues such that the glycosylation pattern is human.

[0438] It is known to those skilled in the art that differing protein glycosylation may result in differing protein characteristics. For instance, the efficacy of a therapeutic protein produced in a microorganism host, such as yeast, and glycosylated utilizing the yeast endogenous pathway may be reduced compared to that of the same protein expressed in a mammalian cell, such as a CHO cell line. Such glycoproteins may also be immunogenic in humans and show reduced half-life in vivo after administration. Specific receptors in humans and other animals may recognize specific glycosyl residues and promote the rapid clearance of the protein from the bloodstream. Other adverse effects may include changes in protein folding, solubility, susceptibility to proteases, trafficking, transport, compartmentalization, secretion, recognition by other proteins or factors, antigenicity, or allergenicity. Accordingly, a practitioner may choose a therapeutic protein with a specific composition and pattern of glycosylation, for example glycosylation composition and pattern identical, or at least similar, to that produced in human cells or in the species-specific cells of the intended subject animal.

[0439] Expressing glycosylated proteins different from that of a host cell may be achieved by genetically modifying the host cell to express heterologous glycosylation enzymes. Using techniques known in the art a practitioner may generate antibodies or antigen-binding portions thereof exhibiting human protein glycosylation. For example, yeast strains have been genetically modified to express non-naturally occurring glycosylation enzymes such that glycosylated proteins (glycoproteins) produced in these yeast strains exhibit protein glycosylation identical to that of animal cells, especially human cells (U.S. patent applications 20040018590 and 20020137134 and PCT publication WO2005100584 A2).

[0440] In addition to the binding proteins, the present invention is also directed to anti-idiotypic (anti-Id) antibodies specific for such binding proteins of the invention. An anti-Id antibody is an antibody, which recognizes unique determinants generally associated with the antigen-binding region of another antibody. The anti-Id can be prepared by immunizing an animal with the binding protein or a CDR containing region thereof. The immunized animal will recognize, and respond to the idiotypic determinants of the immunizing antibody and produce an anti-Id antibody. It is readily apparent that it may be easier to generate anti-idiotypic antibodies to the two or more parent antibodies incorporated into a DVD-Ig molecule; and confirm binding studies by methods well recognized in the art (e.g., BIAcore, ELISA) to verify that anti-idiotypic antibodies specific for the idiotype of each parent antibody also recognize the idiotype (e.g., antigen binding site) in the context of the DVD-Ig. The anti-idiotypic antibodies specific for each of the two or more antigen binding sites of a DVD-Ig provide ideal reagents to measure DVD-Ig concentrations of a human DVD-Ig in patrient serum; DVD-Ig concentration assays can be established using a “sandwich assay ELISA format” with an antibody to a first antigen binding regions coated on the solid phase (e.g., BIAcore chip, ELISA plate etc.), rinsed with rinsing buffer, incubation with the serum sample, another rinsing step and ultimately incubation with another anti-idiotypic antibody to the another antigen binding site, itself labeled with an enzyme for quantitation of the binding reaction. In an embodiment, for a DVD-Ig with more than two different binding sites, anti-idiotypic antibodies to the two outermost binding sites (most distal and proximal from the constant region) will not only help in determining the DVD-Ig concentration in human serum but also document the integrity of the molecule in vivo. Each anti-Id antibody may also be used as an “immunogen” to induce an immune response in yet another animal, producing a so-called anti-anti-Id antibody.

[0441] Further, it will be appreciated by one skilled in the art that a protein of interest may be expressed using a library of host cells genetically engineered to express various glycosylation enzymes, such that member host cells of the library produce the protein of interest with variant glycosylation patterns. A practitioner may then select and isolate the protein of interest with particular novel glycosylation patterns. In an embodiment, the protein having a particularly selected novel glycosylation pattern exhibits improved or altered biological properties.

### III. Uses of DVD-Ig

[0442] Given their ability to bind to two or more antigens the binding proteins of the invention can be used to detect the antigens (e.g., in a biological sample, such as serum or plasma), using a conventional immunoassay, such as an enzyme linked immunosorbent assays (ELISA), an radioimmunoassay (RIA) or tissue immunohistochemistry. The DVD-Ig is directly or indirectly labeled with a detectable substance to facilitate detection of the bound or unbound antibody. Suitable detectable substances include various enzymes, prosthetic groups, fluorescent materials, luminescent materials and radioactive materials. Examples of suitable enzymes include horseradish peroxidase, alkaline phosphatase, β-galactosidase, or acetylcholinesterase; examples of suitable prosthetic group complexes include streptavidin/biotin and avidin/biotin; examples of suitable fluorescent materials include umbelliferone, fluorescein, fluorescein isothiocyanate, rhodamine, dichlorotriazinylamine fluorescein, dansyl chloride or phycoerythrin; an example of a luminescent material includes luminol; and examples of suitable radioactive material include ³H, ¹⁴C, ³⁵S, ⁹⁰Y, ⁹⁹Tc, ¹¹¹In, ¹²⁵I, ¹³¹I, ¹⁷⁷Lu, ¹⁶⁶Ho, or ¹⁵³Sm.

[0443] In an embodiment, the binding proteins of the invention are capable of neutralizing the activity of the antigens both in vitro and in vivo. Accordingly, such DVD-Igs can be used to inhibit antigen activity, e.g., in a cell culture containing the antigens, in human subjects or in other mammalian subjects having the antigens with which a binding protein of the invention cross-reacts. In another embodiment, the invention provides a method for reducing antigen activity in a subject suffering from a disease or disorder in which the antigen activity is detrimental. A binding protein of the invention can be administered to a human subject for therapeutic purposes.

[0444] As used herein, the term “a disorder in which antigen activity is detrimental” is intended to include diseases and other disorders in which the presence of the antigen in a subject suffering from the disorder has been shown to be or is suspected of being either responsible for the pathophysiology of the disorder or a factor that contributes to a worsening of the disorder. Accordingly, a disorder in which antigen activity is detrimental is a disorder in which reduction of antigen activity is expected to alleviate the symptoms and/or progression of the disorder. Such disorders may be evidenced, for example, by an increase in the concentration of the antigen in a biological fluid of a subject suffering from the disorder (e.g., an increase in the concentration of antigen in serum, plasma, synovial fluid, etc. of the subject). Non-limiting examples of disorders that can be treated with the binding proteins of the invention include those disorders discussed below and in the section pertaining to pharmaceutical compositions of the antibodies of the invention.

[0445] The DVD-Igs of the invention may bind one antigen or multiple antigens. Such antigens include, but are not limited to, the targets listed in the following databases, which databases are incorporated herein by reference. These target databases include those listings:

Therapeutic targets (http://xin.cz3.nus.edu.sg/group/cjttd/ttd.asp);
Cytokines and cytokine receptors (http://www.cytokinewebfacts.com/, http://www.copewithcytokines.de/cope.cgi, and http://cmbi.bjmu.edu.cn/cmbidata/cgf/CGF_Database/cytokine.medic.kumamoto-u.ac.jp/CFC/indexR.html);
Chemokines (http://cytokine.medic.kumamoto-u.ac.jp/CFC/CK/Chemokine.html);
Chemokine receptors and GPCRs (http://csp.medic.kumamoto-u.ac.jp/CSP/Receptor.html, http://www.gper.org/7tm/);
Olfactory Receptors (http://senselab.med.yale.edu/senselab/ORDB/default.asp);
Receptors (http://www.iuphar-db.org/iuphar-rd/list/index.htm);
Cancer targets (http://cged.hgc.jp/cgi-bin/input.cgi);
Secreted proteins as potential antibody targets (http://spd.cbi.pku.edu.cn/);
Protein kinases (http://spd.cbi.pku.edu.cn/), and
Human CD markers (http://content.labvelocity.com/tools/6/1226/CD_table_final_locked.pdf) and (Zola H, 2005 CD molecules 2005: human cell differentiation molecules Blood, 106:3123-6).

[0446] DVD-Igs are useful as therapeutic agents to simultaneously block two different targets to enhance efficacy/safety and/or increase patient coverage. Such targets may include soluble targets (TNF) and cell surface receptor targets (VEGFR and EGFR). It can also be used to induce redirected cytotoxicity between tumor cells and T cells (Her2 and CD3) for cancer therapy, or between autoreactive cell and effector cells for autoimmune disease or transplantation, or between any target cell and effector cell to eliminate disease-causing cells in any given disease.

[0447] In addition, DVD-Ig can be used to trigger receptor clustering and activation when it is designed to target two different epitopes on the same receptor. This may have benefit in making agonistic and antagonistic anti-GPCR therapeutics. In this case, DVD-Ig can be used to target two different epitopes (including epitopes on both the loop regions and the extracellular domain) on one cell for clustering/signaling (two cell surface molecules) or signaling (on one molecule). Similarly, a DVD-Ig molecule can be designed to triger CTLA-4 ligation, and a negative signal by targeting two different epitopes (or 2 copies of the same epitope) of CTLA-4 extracellular domain, leading to down regulation of the immune response. CTLA-4 is a clinically validated target for therapeutic treatment of a number of immunological disorders. CTLA-4/B7 interactions negatively regulate T cell activation by attenuating cell cycle progression, IL-2 production, and proliferation of T cells following activation, and CTLA-4 (CD152) engagement can down-regulate T cell activation and promote the induction of immune tolerance. However, the strategy of attenuating T cell activation by agonistic antibody engagement of CTLA-4 has been unsuccessful since CTLA-4 activation requires ligation. The molecular interaction of CTLA-4/B7 is in “skewed zipper” arrays, as demonstrated by crystal structural analysis (Stamper 2001 Nature 410:608). However none of the currently available CTLA-4 binding reagents have ligation properties, including anti-CTLA-4 mAbs. There have been several attempts to address this issue. In one case, a cell member-bound single chain antibody was generated, and significantly inhibited allogeneic rejection in mice (Hwang 2002 JI 169:633). In a separate case, artificial APC surface-linked single-chain antibody to CTLA-4 was generated and demonstrated to attenuate T cell responses (Griffin 2000 JI 164:4433). In both cases, CTLA-4 ligation was achieved by closely localized member-bound antibodies in artificial systems. While these experiments provide proof-of-concept for immune down-regulation by triggering CTLA-4 negative signaling, the reagents used in these reports are not suitable for therapeutic use. To this end, CTLA-4 ligation may be achieved by using a DVD-Ig molecule, which target two different epitopes (or 2 copies of the same epitope) of CTLA-4 extracellular domain. The rationale is that the distance spanning two binding sites of an IgG, approximately 150-170 Å, is too large for active ligation of CTLA-4 (30-50 Å between 2 CTLA-4 homodimer). However the distance between the two binding sites on DVD-Ig (one arm) is much shorter, also in the range of 30-50 Å, allowing proper ligation of CTLA-4.

[0448] Similarly, DVD-Ig can target two different members of a cell surface receptor complex (e.g., IL-12R alpha and beta). Furthermore, DVD-Ig can target CR1 and a soluble protein/pathogen to drive rapid clearance of the target soluble protein/pathogen.

[0449] Additionally, DVD-Igs of the invention can be employed for tissue-specific delivery (target a tissue marker and a disease mediator for enhanced local PK thus higher efficacy and/or lower toxicity), including intracellular delivery (targeting an internalizing receptor and a intracellular molecule), delivering to inside brain (targeting transferrin receptor and a CNS disease mediator for crossing the blood-brain barrier). DVD-Ig can also serve as a carrier protein to deliver an antigen to a specific location via binding to a non-neutralizing epitope of that antigen and also to increase the half-life of the antigen. Furthermore, DVD-Ig can be designed to either be physically linked to medical devices implanted into patients or target these medical devices (see Burke, Sandra E.; Kuntz, Richard E.; Schwartz, Lewis B., Zotarolimus eluting stents. Advanced Drug Delivery Reviews (2006), 58(3), 437-446; Surface coatings for biological activation and functionalization of medical devices, Hildebrand, H. F.; Blanchemain, N.; Mayer, G.; Chai, F.; Lefebvre, M.; Boschin, F., Surface and Coatings Technology (2006), 200(22-23), 6318-6324; Drug/device combinations for local drug therapies and infection prophylaxis, Wu, Peng; Grainger, David W., Biomaterials (2006), 27(11), 2450-2467; Mediation of the cytokine network in the implantation of orthopedic devices., Marques, A. P.; Hunt, J. A.; Reis, Rui L., Biodegradable Systems in Tissue Engineering and Regenerative Medicine (2005), 377-397). Briefly, directing appropriate types of cell to the site of medical implant may promote healing and restoring normal tissue function. Alternatively, inhibition of mediators (including but not limited to cytokines), released upon device implantation by a DVD coupled to or target to a device is also provided. For example, Stents have been used for years in interventional cardiology to clear blocked arteries and to improve the flow of blood to the heart muscle. However, traditional bare metal stents have been known to cause restenosis (re-narrowing of the artery in a treated area) in some patients and can lead to blood clots. Recently, an anti-CD34 antibody coated stent has been described which reduced restenosis and prevents blood clots from occurring by capturing endothelial progenitor cells (EPC) circulating throughout the blood. Endothelial cells are cells that line blood vessels, allowing blood to flow smoothly. The EPCs adhere to the hard surface of the stent forming a smooth layer that not only promotes healing but prevents restenosis and blood clots, complications previously associated with the use of stents (Aoji et al. 2005 J Am Coll Cardiol. 45(10):1574-9). In addition to improving outcomes for patients requiring stents, there are also implications for patients requiring cardiovascular bypass surgery. For example, a prosthetic vascular conduit (artificial artery) coated with anti-EPC antibodies would eliminate the need to use arteries from patients legs or arms for bypass surgery grafts. This would reduce surgery and anesthesia times, which in turn will reduce coronary surgery deaths. DVD-Ig are designed in such a way that it binds to a cell surface marker (such as CD34) as well as a protein (or an epitope of any kind, including but not limited to proteins, lipids and polysaccharides) that has been coated on the implanted device to facilitate the cell recruitment. Such approaches can also be applied to other medical implants in general. Alternatively, DVD-Igs can be coated on medical devices and upon implantation and releasing all DVDs from the device (or any other need which may require additional fresh DVD-Ig, including aging and denaturation of the already loaded DVD-Ig) the device could be reloaded by systemic administration of fresh DVD-Ig to the patient, where the DVD-Ig is designed to binds to a target of interest (a cytokine, a cell surface marker (such as CD34) etc.) with one set of binding sites and to a target coated on the device (including a protein, an epitope of any kind, including but not limited to lipids, polysaccharides and polymers) with the other. This technology has the advantage of extending the usefulness of coated implants.

### A. Use of DVD-Igs in Various Diseases

[0450] DVD-Ig molecules of the invention are also useful as therapeutic molecules to treat various diseases. Such DVD molecules may bind one or more targets involved in a specific disease. Examples of such targets in various diseases are described below.

### 1. Human Autoimmune and Inflammatory Response

[0451] Many proteins have been implicated in general autoimmune and inflammatory responses, including C5, CCL1 (1-309), CCL11 (eotaxin), CCL13 (mcp-4), CCL15 (MIP-1d), CCL16 (HCC-4), CCL17 (TARC), CCL18 (PARC), CCL19, CCL2 (mcp-1), CCL20 (MIP-3a), CCL21 (MIP-2), CCL23 (MPIF-1), CCL24 (MPIF-2/eotaxin-2), CCL25 (TECK), CCL26, CCL3 (MIP-1a), CCL4 (MIP-1b), CCL5 (RANTES), CCL7 (mcp-3), CCL8 (mcp-2), CXCL1, CXCL10 (IP-10), CXCL11 (I-TAC/IP-9), CXCL12 (SDF1), CXCL13, CXCL14, CXCL2, CXCL3, CXCL5 (ENA-78/LIX), CXCL6 (GCP-2), CXCL9, IL13, IL8, CCL13 (mcp-4), CCR1, CCR2, CCR3, CCR4, CCR5, CCR6, CCR7, CCR8, CCR9, CX3CR1, IL8RA, XCR1 (CCXCR1), IFNA2, IL10, IL13, IL17C, IL1A, IL1B, IL1F10, IL1F5, IL1F6, IL1F7, IL1F8, IL1F9, IL22, IL5, IL8, IL9, LTA, LTB, MIF, SCYE1 (endothelial Monocyte-activating cytokine), SPP1, TNF, TNFSF5, IFNA2, IL10RA, IL10RB, IL13, IL13RA1, IL5RA, IL9, IL9R, ABCF1, BCL6, C3, C4A, CEBPB, CRP, ICEBERG, IL1R1, IL1RN, IL8RB, LTB4R, TOLLIP, FADD, IRAK1, IRAK2, MYD88, NCK2, TNFAIP3, TRADD, TRAF1, TRAF2, TRAF3, TRAF4, TRAF5, TRAF6, ACVR1, ACVR1B, ACVR2, ACVR2B, ACVRL1, CD28, CD3E, CD3G, CD3Z, CD69, CD80, CD86, CNR1, CTLA4, CYSLTR1, FCER1A, FCER2, FCGR3A, GPR44, HAVCR2, OPRD1, P2RX7, TLR2, TLR3, TLR4, TLR5, TLR6, TLR7, TLR8, TLR9, TLR10, BLR1, CCL1, CCL2, CCL3, CCL4, CCL5, CCL7, CCL8, CCL11, CCL13, CCL15, CCL16, CCL17, CCL18, CCL19, CCL20, CCL21, CCL22, CCL23, CCL24, CCL25, CCR1, CCR2, CCR3, CCR4, CCR5, CCR6, CCR7, CCR8, CCR9, CX3CL1, CX3CR1, CXCL1, CXCL2, CXCL3, CXCL5, CXCL6, CXCL10, CXCL11, CXCL12, CXCL13, CXCR4, GPR2, SCYE1, SDF2, XCL1, XCL2, XCR1, AMH, AMHR2, BMPR1A, BMPR1B, BMPR2, C19orf10 (IL27w), CER1, CSF1, CSF2, CSF3, DKFZp451J0118, FGF2, GFI1, IFNA1, IFNB1, IFNG, IGF1, IL1A, IL1B, IL1R1, IL1R2, IL2, IL2RA, IL2RB, IL2RG, IL3, IL4, IL4R, IL5, IL5RA, IL6, IL6R, IL6ST, IL7, IL8, IL8RA, IL8RB, IL9, IL9R, IL10, IL10RA, IL10RB, IL11, IL11RA, IL12A, IL12B, IL12RB1, IL12RB2, IL13, IL13RA1, IL13RA2, IL15, IL15RA, IL16, IL17, IL17R, IL18, IL18R1, IL19, IL20, KITLG, LEP, LTA, LTB, LTB4R, LTB4R2, LTBR, MIF, NPPB, PDGFB, TBX21, TDGF1, TGFA, TGFB1, TGFB1I1, TGFB2, TGFB3, TGFBI, TGFBR1, TGFBR2, TGFBR3, TH1L, TNF, TNFRSF1A, TNFRSF1B, TNFRSF7, TNFRSF8, TNFRSF9, TNFRSF11A, TNFRSF21, TNFSF4, TNFSF5, TNFSF6, TNFSF11, VEGF, ZFPM2, and RNF110 (ZNF144). In one aspect, DVD-Igs capable of binding one or more of the targets listed herein are provided.

### 2. Asthma

[0452] Allergic asthma is characterized by the presence of eosinophilia, goblet cell metaplasia, epithelial cell alterations, airway hyperreactivity (AHR), and Th2 and Th1 cytokine expression, as well as elevated serum IgE levels. It is now widely accepted that airway inflammation is the key factor underlying the pathogenesis of asthma, involving a complex interplay of inflammatory cells such as T cells, B cells, eosinophils, mast cells and macrophages, and of their secreted mediators including cytokines and chemokines. Corticosteroids are the most important anti-inflammatory treatment for asthma today, however their mechanism of action is non-specific and safety concerns exist, especially in the juvenile patient population. The development of more specific and targeted therapies is therefore warranted. There is increasing evidence that IL-13 in mice mimics many of the features of asthma, including AHR, mucus hypersecretion and airway fibrosis, independently of eosinophilic inflammation (Finotto et al., International Immunology (2005), 17(8), 993-1007; Padilla et al., Journal of Immunology (2005), 174(12), 8097-8105).

[0453] IL-13 has been implicated as having a pivotal role in causing pathological responses associated with asthma. The development of anti-IL-13 mAb therapy to reduce the effects of IL-13 in the lung is an exciting new approach that offers considerable promise as a novel treatment for asthma. However other mediators of differential immunological pathways are also involved in asthma pathogenesis, and blocking these mediators, in addition to IL-13, may offer additional therapeutic benefit. Such target pairs include, but are not limited to, IL-13 and a pro-inflammatory cytokine, such as tumor necrosis factor-α (TNF-α). TNF-α may amplify the inflammatory response in asthma and may be linked to disease severity (McDonnell, et al., Progress in Respiratory Research (2001), 31 (New Drugs for Asthma, Allergy and COPD), 247-250). This suggests that blocking both IL-13 and TNF-α may have beneficial effects, particularly in severe airway disease. In another embodiment the DVD-Ig of the invention binds the targets IL-13 and TNFα and is used for treating asthma.

[0454] Animal models such as OVA-induced asthma mouse model, where both inflammation and AHR can be assessed, are known in the art and may be used to determine the ability of various DVD-Ig molecules to treat asthma. Animal models for studying asthma are disclosed in Coffman, et al., Journal of Experimental Medicine (2005), 201(12), 1875-1879; Lloyd, et al., Advances in Immunology (2001), 77, 263-295; Boyce et al., Journal of Experimental Medicine (2005), 201(12), 1869-1873; and Snibson, et al., Journal of the British Society for Allergy and Clinical Immunology (2005), 35(2), 146-52. In addition to routine safety assessments of these target pairs specific tests for the degree of immunosuppression may be warranted and helpful in selecting the best target pairs (see Luster et al., Toxicology (1994), 92(1-3), 229-43; Descotes, et al., Developments in biological standardization (1992), 77 99-102; Hart et al., Journal of Allergy and Clinical Immunology (2001), 108(2), 250-257).

[0455] Based on the rationale disclosed herein and using the same evaluation model for efficacy and safety other pairs of targets that DVD-Ig molecules can bind and be useful to treat asthma may be determined In an embodiment, such targets include, but are not limited to, IL-13 and IL-1beta, since IL-1beta is also implicated in inflammatory response in asthma; IL-13 and cytokines and chemokines that are involved in inflammation, such as IL-13 and IL-9; IL-13 and IL-4; IL-13 and IL-5; IL-13 and IL-25; IL-13 and TARO; IL-13 and MDC; IL-13 and MIF; IL-13 and TGF-β; IL-13 and LHR agonist; IL-13 and CL25; IL-13 and SPRR2a; IL-13 and SPRR2b; and IL-13 and ADAM8. The present invention also provides DVD-Igs capable of binding one or more targets involved in asthma selected from the group consisting of CSF1 (MCSF), CSF2 (GM-CSF), CSF3 (GCSF), FGF2, IFNA1, IFNB1, IFNG, histamine and histamine receptors, IL1A, IL1B, IL2, IL3, IL4, IL5, IL6, IL7, IL8, IL9, IL10, IL11, IL12A, IL12B, IL13, IL14, IL15, IL16, IL17, IL18, IL19, KITLG, PDGFB, IL2RA, IL4R, IL5RA, IL8RA, IL8RB, IL12RB1, IL12RB2, IL13RA1, IL13RA2, IL18R1, TSLP, CCL1, CCL2, CCL3, CCL4, CCL5, CCL7, CCL8, CCL13, CCL17, CCL18, CCL19, CCL20, CCL22, CCL24, CX3CL1, CXCL1, CXCL2, CXCL3, XCL1, CCR2, CCR3, CCR4, CCR5, CCR6, CCR7, CCR8, CX3CR1, GPR2, XCR1, FOS, GATA3, JAK1, JAK3, STATE, TBX21, TGFB1, TNF, TNFSF6, YY1, CYSLTR1, FCER1A, FCER2, LTB4R, TB4R2, LTBR, and Chitinase.

### 3. Rheumatoid Arthritis

[0456] Rheumatoid arthritis (RA), a systemic disease, is characterized by a chronic inflammatory reaction in the synovium of joints and is associated with degeneration of cartilage and erosion of juxta-articular bone. Many pro-inflammatory cytokines including TNF, chemokines, and growth factors are expressed in diseased joints. Systemic administration of anti-TNF antibody or sTNFR fusion protein to mouse models of RA was shown to be anti-inflammatory and joint protective. Clinical investigations in which the activity of TNF in RA patients was blocked with intravenously administered infliximab (Harriman G, Harper L K, Schaible T F. 1999 Summary of clinical trials in rheumatoid arthritis using infliximab, an anti-TNFalpha treatment. Ann Rheum Dis 58 Suppl 1:I61-4), a chimeric anti-TNF mAb, has provided evidence that TNF regulates IL-6, IL-8, MCP-1, and VEGF production, recruitment of immune and inflammatory cells into joints, angiogenesis, and reduction of blood levels of matrix metalloproteinases-1 and -3. A better understanding of the inflammatory pathway in rheumatoid arthritis has led to identification of other therapeutic targets involved in rheumatoid arthritis. Promising treatments such as interleukin-6 antagonists (IL-6 receptor antibody MRA, developed by Chugai, Roche (see Nishimoto, Norihiro et al., Arthritis & Rheumatism (2004), 50(6), 1761-1769), CTLA4Ig (abatacept, Genovese Mc et al 2005 Abatacept for rheumatoid arthritis refractory to tumor necrosis factor alpha inhibition. N Engl J. Med. 353:1114-23), and anti-B cell therapy (rituximab, Okamoto H, Kamatani N. 2004 Rituximab for rheumatoid arthritis. N Engl J Med. 351:1909) have already been tested in randomized controlled trials over the past year. Other cytokines have been identified and have been shown to be of benefit in animal models, including interleukin-15 (therapeutic antibody HuMax-IL_{—}15, AMG 714 see Baslund, Bo et al., Arthritis & Rheumatism (2005), 52(9), 2686-2692), interleukin-17, and interleukin-18, and clinical trials of these agents are currently under way. Dual-specific antibody therapy, combining anti-TNF and another mediator, has great potential in enhancing clinical efficacy and/or patient coverage. For example, blocking both TNF and VEGF can potentially eradicate inflammation and angiogenesis, both of which are involved in pathophysiology of RA. Blocking other pairs of targets involved in RA including, but not limited to, TNF and IL-18; TNF and IL-12; TNF and IL-23; TNF and IL-1beta; TNF and MIF; TNF and IL-17; TNF and IL-15 with specific DVD Igs is also contemplated. In addition to routine safety assessments of these target pairs, specific tests for the degree of immunosuppression may be warranted and helpful in selecting the best target pairs (see Luster et al., Toxicology (1994), 92(1-3), 229-43; Descotes, et al., Developments in biological standardization (1992), 77 99-102; Hart et al., Journal of Allergy and Clinical Immunology (2001), 108(2), 250-257). Whether a DVD Ig molecule will be useful for the treatment of rheumatoid arthritis can be assessed using pre-clinical animal RA models such as the collagen-induced arthritis mouse model. Other useful models are also well known in the art (see Brand D D., Comp Med. (2005) 55(2):114-22). Based on the cross-reactivity of the parental antibodies for human and mouse othologues (e.g., reactivity for human and mouse TNF, human and mouse IL-15 etc.) validation studies in the mouse CIA model may be conducted with “matched surrogate antibody” derived DVD-Ig molecules; briefly, a DVD-Ig based on two (or more) mouse target specific antibodies may be matched to the extent possible to the characteristics of the parental human or humanized antibodies used for human DVD-Ig construction (similar affinity, similar neutralization potency, similar half-life etc.).

### 4. SLE

[0457] The immunopathogenic hallmark of SLE is the polyclonal B cell activation, which leads to hyperglobulinemia, autoantibody production and immune complex formation. The fundamental abnormality appears to be the failure of T cells to suppress the forbidden B cell clones due to generalized T cell dysregulation. In addition, B and T-cell interaction is facilitated by several cytokines such as IL-10 as well as co-stimulatory molecules such as CD40 and CD40L, B7 and CD28 and CTLA-4, which initiate the second signal. These interactions together with impaired phagocytic clearance of immune complexes and apoptotic material, perpetuate the immune response with resultant tissue injury. The following targets may be involved in SLE and can potentially be used for DVD-Ig approach for therapeutic intervention: B cell targeted therapies: CD-20, CD-22, CD-19, CD28, CD4, CD80, HLA-DRA, IL10, IL2, IL4, TNFRSF5, TNFRSF6, TNFSF5, TNFSF6, BLR1, HDAC4, HDAC5, HDAC7A, HDAC9, ICOSL, IGBP1, MS4A1, RGS1, SLA2, CD81, IFNB1, IL10, TNFRSF5, TNFRSF7, TNFSF5, AICDA, BLNK, GALNAC4S-6ST, HDAC4, HDAC5, HDAC7A, HDAC9, IL10, IL11, IL4, INHA, INHBA, KLF6, TNFRSF7, CD28, CD38, CD69, CD80, CD83, CD86, DPP4, FCER2, IL2RA, TNFRSF8, TNFSF7, CD24, CD37, CD40, CD72, CD74, CD79A, CD79B, CR2, IL1R2, ITGA2, ITGA3, MS4A1, ST6GAL1, CD1C, CHST10, HLA-A, HLA-DRA, and NT5E; co-stimulatory signals: CTLA4 or B7.1/B7.2; inhibition of B cell survival: BlyS, BAFF; Complement inactivation: C5; Cytokine modulation: the key principle is that the net biologic response in any tissue is the result of a balance between local levels of proinflammatory or anti-inflammatory cytokines (see Sfikakis P P et al 2005 Curr Opin Rheumatol 17:550-7). SLE is considered to be a Th-2 driven disease with documented elevations in serum IL-4, IL-6, IL-10. DVD Igs capable of binding one or more targets selected from the group consisting of IL-4, IL-6, IL-10, IFN-α, and TNF-α are also contemplated. Combination of targets discussed herein will enhance therapeutic efficacy for SLE which can be tested in a number of lupus preclinical models (see Peng S L (2004) Methods Mol Med.; 102:227-72). Based on the cross-reactivity of the parental antibodies for human and mouse othologues (e.g., reactivity for human and mouse CD20, human and mouse Interferon alpha etc.) validation studies in a mouse lupus model may be conducted with “matched surrogate antibody” derived DVD-Ig molecules; briefly, a DVD-Ig based two (or more) mouse target specific antibodies may be matched to the extent possible to the characteristics of the parental human or humanized antibodies used for human DVD-Ig construction (similar affinity, similar neutralization potency, similar half-life etc.).

### 5. Multiple Sclerosis

[0458] Multiple sclerosis (MS) is a complex human autoimmune-type disease with a predominantly unknown etiology. Immunologic destruction of myelin basic protein (MBP) throughout the nervous system is the major pathology of multiple sclerosis. MS is a disease of complex pathologies, which involves infiltration by CD4+ and CD8+ T cells and of response within the central nervous system. Expression in the CNS of cytokines, reactive nitrogen species and costimulator molecules have all been described in MS. Of major consideration are immunological mechanisms that contribute to the development of autoimmunity. In particular, antigen expression, cytokine and leukocyte interactions, and regulatory T-cells, which help balance/modulate other T-cells such as Th1 and Th2 cells, are important areas for therapeutic target identification.

[0459] IL-12 is a proinflammatory cytokine that is produced by APC and promotes differentiation of Th1 effector cells. IL-12 is produced in the developing lesions of patients with MS as well as in EAE-affected animals. Previously it was shown that interference in IL-12 pathways effectively prevents EAE in rodents, and that in vivo neutralization of IL-12p40 using a anti-IL-12 mAb has beneficial effects in the myelin-induced EAE model in common marmosets.

[0460] TWEAK is a member of the TNF family, constitutively expressed in the central nervous system (CNS), with pro-inflammatory, proliferative or apoptotic effects depending upon cell types. Its receptor, Fn14, is expressed in CNS by endothelial cells, reactive astrocytes and neurons. TWEAK and Fn14 mRNA expression increased in spinal cord during experimental autoimmune encephalomyelitis (EAE). Anti-TWEAK antibody treatment in myelin oligodendrocyte glycoprotein (MOG) induced EAE in C57BL/6 mice resulted in a reduction of disease severity and leukocyte infiltration when mice were treated after the priming phase.

[0461] One aspect of the invention pertains to DVD Ig molecules capable of binding one or more, for example two, targets selected from the group consisting of IL-12, TWEAK, IL-23, CXCL13, CD40, CD40L, IL-18, VEGF, VLA-4, TNF, CD45RB, CD200, IFNgamma, GM-CSF, FGF, C5, CD52, and CCR2. An embodiment includes a dual-specific anti-IL-12/TWEAK DVD Ig as a therapeutic agent beneficial for the treatment of MS.

[0462] Several animal models for assessing the usefulness of the DVD molecules to treat MS are known in the art (see Steinman L, et al., (2005) Trends Immunol. 26(11):565-71; Lublin F D., et al., (1985) Springer Semin Immunopathol. 8(3):197-208; Genain C P, et al., (1997) J Mol Med. 75(3):187-97; Tuohy V K, et al., (1999) J Exp Med. 189(7):1033-42; Owens T, et al., (1995) Neurol Clin. 13(1):51-73; and 't Hart B A, et al., (2005) J Immunol 175(7):4761-8. Based on the cross-reactivity of the parental antibodies for human and animal species othologues (e.g., reactivity for human and mouse IL-12, human and mouse TWEAK etc.) validation studies in the mouse EAE model may be conducted with “matched surrogate antibody” derived DVD-Ig molecules; briefly, a DVD-Ig based on to (or more) mouse target specific antibodies may be matched to the extent possible to the characteristics of the parental human or humanized antibodies used for human DVD-Ig construction (similar affinity, similar neutralization potency, similar half-life etc.). The same concept applies to animal models in other non-rodent species, where a “matched surrogate antibody” derived DVD-Ig would be selected for the anticipated pharmacology and possibly safety studies. In addition to routine safety assessments of these target pairs specific tests for the degree of immunosuppression may be warranted and helpful in selecting the best target pairs (see Luster et al., Toxicology (1994), 92(1-3), 229-43; Descotes, et al., Developments in biological standardization (1992), 77 99-102; Jones R. 2000 Rovelizumab (ICOS Corp). IDrugs. 3(4):442-6).

### 6. Sepsis

[0463] The pathophysiology of sepsis is initiated by the outer membrane components of both gram-negative organisms (lipopolysaccharide [LPS], lipid A, endotoxin) and gram-positive organisms (lipoteichoic acid, peptidoglycan). These outer membrane components are able to bind to the CD14 receptor on the surface of monocytes. By virtue of the recently described toll-like receptors, a signal is then transmitted to the cell, leading to the eventual production of the proinflammatory cytokines tumor necrosis factor-alpha (TNF-alpha) and interleukin-1 (IL-1). Overwhelming inflammatory and immune responses are essential features of septic shock and play a central part in the pathogenesis of tissue damage, multiple organ failure, and death induced by sepsis. Cytokines, especially tumor necrosis factor (TNF) and interleukin (IL-1), have been shown to be critical mediators of septic shock. These cytokines have a direct toxic effect on tissues; they also activate phospholipase A2. These and other effects lead to increased concentrations of platelet-activating factor, promotion of nitric oxide synthase activity, promotion of tissue infiltration by neutrophils, and promotion of neutrophil activity.

[0464] The treatment of sepsis and septic shock remains a clinical conundrum, and recent prospective trials with biological response modifiers (i.e. anti-TNF, anti-MIF) aimed at the inflammatory response have shown only modest clinical benefit. Recently, interest has shifted toward therapies aimed at reversing the accompanying periods of immune suppression. Studies in experimental animals and critically ill patients have demonstrated that increased apoptosis of lymphoid organs and some parenchymal tissues contribute to this immune suppression, anergy, and organ system dysfunction. During sepsis syndromes, lymphocyte apoptosis can be triggered by the absence of IL-2 or by the release of glucocorticoids, granzymes, or the so-called ‘death’ cytokines: tumor necrosis factor alpha or Fas ligand. Apoptosis proceeds via auto-activation of cytosolic and/or mitochondrial caspases, which can be influenced by the pro- and anti-apoptotic members of the Bcl-2 family. In experimental animals, not only can treatment with inhibitors of apoptosis prevent lymphoid cell apoptosis; it may also improve outcome. Although clinical trials with anti-apoptotic agents remain distant due in large part to technical difficulties associated with their administration and tissue targeting, inhibition of lymphocyte apoptosis represents an attractive therapeutic target for the septic patient. Likewise, a dual-specific agent targeting both inflammatory mediator and a apoptotic mediator, may have added benefit. One aspect of the invention pertains to DVD Igs capable of binding one or more targets involved in sepsis, in an embodiment two targets, selected from the group consisting TNF, IL-1, MIF, IL-6, IL-8, IL-18, IL-12, IL-23, FasL, LPS, Toll-like receptors, TLR-4, tissue factor, MIP-2, ADORA2A, CASP1, CASP4, IL-10, IL-1B, NFKB1, PROC, TNFRSF1A, CSF3, CCR3, IL1RN, MIF, NFKB1, PTAFR, TLR2, TLR4, GPR44, HMOX1, midkine, IRAK1, NFKB2, SERPINA1, SERPINE1, and TREM1. The efficacy of such DVD Igs for sepsis can be assessed in preclinical animal models known in the art (see Buras J A, et al., (2005) Nat Rev Drug Discov. 4(10):854-65 and Calandra T, et al., (2000) Nat Med. 6(2):164-70).

### 7. Neurological Disorders

### 7.1. Neurodegenerative Diseases

[0465] Chronic neurodegenerative diseases are usually age-dependent diseases characterized by progressive loss of neuronal functions (neuronal cell death, demyelination), loss of mobility and loss of memory. Emerging knowledge of the mechanisms underlying chronic neurodegenerative diseases (e.g., Alzheimer's disease disease) show a complex etiology and a variety of factors have been recognized to contribute to their development and progression e.g., age, glycemic status, amyloid production and multimerization, accumulation of advanced glycation-end products (AGE) which bind to their receptor RAGE (receptor for AGE), increased brain oxidative stress, decreased cerebral blood flow, neuroinflammation including release of inflammatory cytokines and chemokines, neuronal dysfunction and microglial activation. Thus these chronic neurodegenerative diseases represent a complex interaction between multiple cell types and mediators. Treatment strategies for such diseases are limited and mostly constitute either blocking inflammatory processes with non-specific anti-inflammatory agents (e.g., corticosteroids, COX inhibitors) or agents to prevent neuron loss and/or synaptic functions. These treatments fail to stop disease progression. Recent studies suggest that more targeted therapies such as antibodies to soluble A-b peptide (including the A-b oligomeric forms) can not only help stop disease progression but may help maintain memory as well. These preliminary observations suggest that specific therapies targeting more than one disease mediator (e.g., A-b and a pro-inflammatory cytokine such as TNF) may provide even better therapeutic efficacy for chronic neurodegenerative diseases than observed with targeting a single disease mechanism (e.g., soluble A-balone) (see C. E. Shepherd, et al, Neurobiol Aging. 2005 Oct. 24; Nelson R B., Curr Pharm Des. 2005; 11:3335; William L. Klein; Neurochem Int. 2002; 41:345; Michelle C Janelsins, et al., J. Neuroinflammation. 2005; 2:23; Soloman B., Curr Alzheimer Res. 2004; 1:149; Igor Klyubin, et al., Nat. Med. 2005; 11:556-61; Arancio O, et al., EMBO Journal (2004) 1-10; Bornemann K D, et al., Am J. Pathol. 2001; 158:63; Deane R, et al., Nat. Med. 2003; 9:907-13; and Eliezer Masliah, et al., Neuron. 2005; 46:857).

[0466] The DVD-Ig molecules of the invention can bind one or more targets involved in Chronic neurodegenerative diseases such as Alzheimers. Such targets include, but are not limited to, any mediator, soluble or cell surface, implicated in AD pathogenesis e.g AGE (S100 A, amphoterin), pro-inflammatory cytokines (e.g., IL-1), chemokines (e.g., MCP 1), molecules that inhibit nerve regeneration (e.g., Nogo, RGM A), molecules that enhance neurite growth (neurotrophins). The efficacy of DVD-Ig molecules can be validated in pre-clinical animal models such as the transgenic mice that over-express amyloid precursor protein or RAGE and develop Alzheimer's disease-like symptoms. In addition, DVD-Ig molecules can be constructed and tested for efficacy in the animal models and the best therapeutic DVD-Ig can be selected for testing in human patients. DVD-Ig molecules can also be employed for treatment of other neurodegenerative diseases such as Parkinson's disease. Alpha-Synuclein is involved in Parkinson's pathology. A DVD-Ig capable of targeting alpha-synuclein and inflammatory mediators such as TNF, IL-1, MCP-1 can prove effective therapy for Parkinson's disease and are contemplated in the invention.

### 7.2 Neuronal Regeneration and Spinal Cord Injury

[0467] Despite an increase in knowledge of the pathologic mechanisms, spinal cord injury (SCI) is still a devastating condition and represents a medical indication characterized by a high medical need. Most spinal cord injuries are contusion or compression injuries and the primary injury is usually followed by secondary injury mechanisms (inflammatory mediators e.g., cytokines and chemokines) that worsen the initial injury and result in significant enlargement of the lesion area, sometimes more than 10-fold. These primary and secondary mechanisms in SCI are very similar to those in brain injury caused by other means e.g., stroke. No satisfying treatment exists and high dose bolus injection of methylprednisolone (MP) is the only used therapy within a narrow time window of 8 h post injury. This treatment, however, is only intended to prevent secondary injury without causing any significant functional recovery. It is heavily critisized for the lack of unequivocal efficacy and severe adverse effects, like immunosuppression with subsequent infections and severe histopathological muscle alterations. No other drugs, biologics or small molecules, stimulating the endogenous regenerative potential are approved, but promising treatment principles and drug candidates have shown efficacy in animal models of SCI in recent years. To a large extent the lack of functional recovery in human SCI is caused by factors inhibiting neurite growth, at lesion sites, in scar tissue, in myelin as well as on injury-associated cells. Such factors are the myelin-associated proteins NogoA, OMgp and MAG, RGM A, the scar-associated CSPG (Chondroitin Sulfate Proteoglycans) and inhibitory factors on reactive astrocytes (some semaphorins and ephrins). However, at the lesion site not only growth inhibitory molecules are found but also neurite growth stimulating factors like neurotrophins, laminin, L1 and others. This ensemble of neurite growth inhibitory and growth promoting molecules may explain that blocking single factors, like NogoA or RGM A, resulted in significant functional recovery in rodent SCI models, because a reduction of the inhibitory influences could shift the balance from growth inhibition to growth promotion. However, recoveries observed with blocking a single neurite outgrowth inhibitory molecule were not complete. To achieve faster and more pronounced recoveries either blocking two neurite outgrowth inhibitory molecules e.g Nogo and RGM A, or blocking an neurite outgrowth inhibitory molecule and enhancing functions of a neurite outgrowth enhancing molecule e.g Nogo and neurotrophins, or blocking a neurite outgrowth inhibitory moleclule e.g., Nogo and a pro-inflammatory molecule e.g., TNF, may be desirable (see McGee A W, et al., Trends Neurosci. 2003; 26:193; Marco Domeniconi, et al., J Neurol Sci. 2005; 233:43; Milan Makwanal, et al., FEBS J. 2005; 272:2628; Barry J. Dickson, Science. 2002; 298:1959; Felicia Yu Hsuan Teng, et al., J Neurosci Res. 2005; 79:273; Tara Karnezis, et al., Nature Neuroscience 2004; 7, 736; Gang Xu, et al., J. Neurochem. 2004; 91; 1018).

[0468] In one aspect, DVD-Igs capable of binding target pairs such as NgR and RGM A; NogoA and RGM A; MAG and RGM A; OMGp and RGM A; RGM A and RGM B; CSPGs and RGM A; aggrecan, midkine, neurocan, versican, phosphacan, Te38 and TNF-α; Aβ globulomer-specific antibodies combined with antibodies promoting dendrite & axon sprouting are provided. Dendrite pathology is a very early sign of AD and it is known that NOGO A restricts dendrite growth. One can combine such type of ab with any of the SCI-candidate (myelin-proteins) Ab. Other DVD-Ig targets may include any combination of NgR-p75, NgR-Troy, NgR-Nogo66 (Nogo), NgR-Lingo, Lingo-Troy, Lingo-p75, MAG or Omgp. Additionally, targets may also include any mediator, soluble or cell surface, implicated in inhibition of neurite e.g Nogo, Ompg, MAG, RGM A, semaphorins, ephrins, soluble A-b, pro-inflammatory cytokines (e.g., IL-1), chemokines (e.g., MIP 1a), molecules that inhibit nerve regeneration. The efficacy of anti-nogo/anti-RGM A or similar DVD-Ig molecules can be validated in pre-clinical animal models of spinal cord injury. In addition, these DVD-Ig molecules can be constructed and tested for efficacy in the animal models and the best therapeutic DVD-Ig can be selected for testing in human patients. In addition, DVD-Ig molecules can be constructed that target two distinct ligand binding sites on a single receptor e.g., Nogo receptor which binds three ligand Nogo, Ompg, and MAG and RAGE that binds A-b and S100 A. Furthermore, neurite outgrowth inhibitors e.g., nogo and nogo receptor, also play a role in preventing nerve regeneration in immunological diseases like multiple sclerosis. Inhibition of nogo-nogo receptor interaction has been shown to enhance recovery in animal models of multiple sclerosis. Therefore, DVD-Ig molecules that can block the function of one immune mediator eg a cytokine like IL-12 and a neurite outgrowth inhibitor molecule eg nogo or RGM may offer faster and greater efficacy than blocking either an immune or an neurite outgrowth inhibitor molecule alone.

### 8. Oncological Disorders

[0469] Monoclonal antibody therapy has emerged as an important therapeutic modality for cancer (von Mehren M, et al 2003 Monoclonal antibody therapy for cancer. Annu Rev Med.; 54:343-69). Antibodies may exert antitumor effects by inducing apoptosis, redirected cytotoxicity, interfering with ligand-receptor interactions, or preventing the expression of proteins that are critical to the neoplastic phenotype. In addition, antibodies can target components of the tumor microenvironment, perturbing vital structures such as the formation of tumor-associated vasculature. Antibodies can also target receptors whose ligands are growth factors, such as the epidermal growth factor receptor. The antibody thus inhibits natural ligands that stimulate cell growth from binding to targeted tumor cells. Alternatively, antibodies may induce an anti-idiotype network, complement-mediated cytotoxicity, or antibody-dependent cellular cytotoxicity (ADCC). The use of dual-specific antibody that targets two separate tumor mediators will likely give additional benefit compared to a mono-specific therapy. DVD Igs capable of binding the following pairs of targets to treat oncological disease are also contemplated: IGF1 and IGF2; IGF1/2 and HER-2; VEGFR and EGFR; CD20 and CD3; CD138 and CD20; CD38 and CD20; CD38 and CD138; CD40 and CD20; CD138 and CD40; CD38 and CD40; CD-20 and CD-19; CD-20 and EGFR; CD-20 and CD-80; CD-20 and CD-22; CD-3 and HER-2; CD-3 and CD-19; EGFR and HER-2; EGFR and CD-3; EGFR and IGF1,2; EGFR and IGF1R; EGFR and RON; EGFR and HGF; EGFR and c-MET; HER-2 and IGF1,2; HER-2 and IGF1R; RON and HGF; VEGF and EGFR; VEGF and HER-2; VEGF and CD-20; VEGF and IGF1,2; VEGF and DLL4; VEGF and HGF; VEGF and RON; VEGF and NRP1; CD20 and CD3; VEGF and PLGF; DLL4 and PLGF; ErbB3 and EGFR; HGF and ErbB3, HER-2 and ErbB3; c-Met and ErbB3; HER-2 and PLGF; HER-2 and HER-2.

[0470] In another embodiment, a DVD of the invention is capable of binding VEGF and phosphatidylserine; VEGF and ErbB3; VEGF and PLGF; VEGF and ROBO4; VEGF and BSG2; VEGF and CDCP1; VEGF and ANPEP; VEGF and c-MET; HER-2 and ERB3; HER-2 and BSG2; HER-2 and CDCP1; HER-2 and ANPEP; EGFR and CD64; EGFR and BSG2; EGFR and CDCP1; EGFR and ANPEP; IGF1R and PDGFR; IGF1R and VEGF; IGF1R and CD20; CD20 and CD74; CD20 and CD30; CD20 and DR4; CD20 and VEGFR2; CD20 and CD52; CD20 and CD4; HGF and c-MET; HGF and NRP1; HGF and phosphatidylserine; ErbB3 and IGF1R; ErbB3 and IGF1,2; c-Met and Her-2; c-Met and NRP1; c-Met and IGF1R; IGF1,2 and PDGFR; IGF1,2 and CD20; IGF1,2 and IGF1R; IGF2 and EGFR; IGF2 and HER2; IGF2 and CD20; IGF2 and VEGF; IGF2 and IGF1R; IGF1 and IGF2; PDGFRa and VEGFR2; PDGFRa and PLGF; PDGFRa and VEGF; PDGFRa and c-Met; PDGFRa and EGFR; PDGFRb and VEGFR2; PDGFRb and c-Met; PDGFRb and EGFR; RON and c-Met; RON and MTSP1; RON and MSP; RON and CDCP1; VGFR1 and PLGF; VGFR1 and RON; VGFR1 and EGFR; VEGFR2 and PLGF; VEGFR2 and NRP1; VEGFR2 and RON; VEGFR2 and DLL4; VEGFR2 and EGFR; VEGFR2 and ROBO4; VEGFR2 and CD55; LPA and S1P; EPHB2 and RON; CTLA4 and VEGF; CD3 and EPCAM; CD40 and IL6; CD40 and IGF; CD40 and CD56; CD40 and CD70; CD40 and VEGFR1; CD40 and DR5; CD40 and DR4; CD40 and APRIL; CD40 and BCMA; CD40 and RANKL; CD28 and MAPG; CD80 and CD40; CD80 and CD30; CD80 and CD33; CD80 and CD74; CD80 and CD2; CD80 and CD3; CD80 and CD19; CD80 and CD4; CD80 and CD52; CD80 and VEGF; CD80 and DR5; CD80 and VEGFR2; CD22 and CD20; CD22 and CD80; CD22 and CD40; CD22 and CD23; CD22 and CD33; CD22 and CD74; CD22 and CD19; CD22 and DR5; CD22 and DR4; CD22 and VEGF; CD22 and CD52; CD30 and CD20; CD30 and CD22; CD30 and CD23; CD30 and CD40; CD30 and VEGF; CD30 and CD74; CD30 and CD19; CD30 and DR5; CD30 and DR4; CD30 and VEGFR2; CD30 and CD52; CD30 and CD4; CD138 and RANKL; CD33 and FTL3; CD33 and VEGF; CD33 and VEGFR2; CD33 and CD44; CD33 and DR4; CD33 and DR5; DR4 and CD137; DR4 and IGF1,2; DR4 and IGF1R; DR4 and DR5; DR5 and CD40; DR5 and CD137; DR5 and CD20; DR5 and EGFR; DR5 and IGF1,2; DR5 and IGFR, DR5 and HER-2, EGFR and DLL4. Other target combinations include one or more members of the EGF/erb-2/erb-3 family. Other targets (one or more) involved in oncological diseases that DVD Igs may bind include, but are not limited to those selected from the group consisting of: CD52, CD20, CD19, CD3, CD4, CD8, BMP6, IL12A, IL1A, IL1B, IL2, IL24, INHA, TNF, TNFSF10, BMP6, EGF, FGF1, FGF10, FGF11, FGF12, FGF13, FGF14, FGF16, FGF17, FGF18, FGF19, FGF2, FGF20, FGF21, FGF22, FGF23, FGF3, FGF4, FGF5, FGF6, FGF7, FGF8, FGF9, GRP, IGF1, IGF2, IL12A, IL1A, IL1B, IL2, INHA, TGFA, TGFB1, TGFB2, TGFB3, VEGF, CDK2, FGF10, FGF18, FGF2, FGF4, FGF7, IGF1R, IL2, BCL2, CD164, CDKN1A, CDKN1B, CDKN1C, CDKN2A, CDKN2B, CDKN2C, CDKN3, GNRH1, IGFBP6, IL1A, IL1B, ODZ1, PAWR, PLG, TGFB1I1, AR, BRCA1, CDK3, CDK4, CDK5, CDK6, CDK7, CDK9, E2F1, EGFR, ENO1, ERBB2, ESR1, ESR2, IGFBP3, IGFBP6, IL2, INSL4, MYC, NOX5, NR6A1, PAP, PCNA, PRKCQ, PRKD1, PRL, TP53, FGF22, FGF23, FGF9, IGFBP3, IL2, INHA, KLK6, TP53, CHGB, GNRH1, IGF1, IGF2, INHA, INSL3, INSL4, PRL, KLK6, SHBG, NR1D1, NR1H3, NR113, NR2F6, NR4A3, ESR1, ESR2, NROB1, NROB2, NR1D2, NR1H2, NR1H4, NR112, NR2C1, NR2C2, NR2E1, NR2E3, NR2F1, NR2F2, NR3C1, NR3C2, NR4A1, NR4A2, NR5A1, NR5A2, NR6A1, PGR, RARB, FGF1, FGF2, FGF6, KLK3, KRT1, APOC1, BRCA1, CHGA, CHGB, CLU, COL1A1, COL6A1, EGF, ERBB2, ERK8, FGF1, FGF10, FGF11, FGF13, FGF14, FGF16, FGF17, FGF18, FGF2, FGF20, FGF21, FGF22, FGF23, FGF3, FGF4, FGF5, FGF6, FGF7, FGF8, FGF9, GNRH1, IGF1, IGF2, IGFBP3, IGFBP6, IL12A, IL1A, IL1B, IL2, IL24, INHA, INSL3, INSL4, KLK10, KLK12, KLK13, KLK14, KLK15, KLK3, KLK4, KLK5, KLK6, KLK9, MMP2, MMP9, MSMB, NTN4, ODZ1, PAP, PLAU, PRL, PSAP, SERPINA3, SHBG, TGFA, TIMP3, CD44, CDH1, CDH10, CDH19, CDH20, CDH7, CDH9, CDH1, CDH10, CDH13, CDH18, CDH19, CDH20, CDH7, CDH8, CDH9, ROBO2, CD44, ILK, ITGA1, APC, CD164, COL6A1, MTSS1, PAP, TGFB1I1, AGR2, AIG1, AKAP1, AKAP2, CANT1, CAV1, CDH12, CLDN3, CLN3, CYB5, CYC1, DAB21P, DES, DNCL1, ELAC2, ENO2, ENO3, FASN, FLJ12584, FLJ25530, GAGEB1, GAGEC1, GGT1, GSTP1, HIP1, HUMCYT2A, IL29, K6HF, KAI1, KRT2A, MIB1, PART1, PATE, PCA3, PIAS2, PIK3CG, PPID, PR1, PSCA, SLC2A2, SLC33A1, SLC43A1, STEAP, STEAP2, TPM1, TPM2, TRPC6, ANGPT1, ANGPT2, ANPEP, ECGF1, EREG, FGF1, FGF2, FIGF, FLT1, JAG1, KDR, LAMAS, NRP1, NRP2, PGF, PLXDC1, STAB1, VEGF, VEGFC, ANGPTL3, BAI1, COL4A3, IL8, LAMAS, NRP1, NRP2, STAB1, ANGPTL4, PECAM1, PF4, PROK2, SERPINF1, TNFAIP2, CCL11, CCL2, CXCL1, CXCL10, CXCL3, CXCL5, CXCL6, CXCL9, IFNA1, IFNB1, IFNG, IL1B, IL6, MDK, EDG1, EFNA1, EFNA3, EFNB2, EGF, EPHB4, FGFR3, HGF, IGF1, ITGB3, PDGFA, TEK, TGFA, TGFB1, TGFB2, TGFBR1, CCL2, CDH5, COL18A1, EDG1, ENG, ITGAV, ITGB3, THBS1, THBS2, BAD, BAG1, BCL2, CCNA1, CCNA2, CCND1, CCNE1, CCNE2, CDH1 (E-cadherin), CDKN1B (p27Kip1), CDKN2A (p161NK4a), COL6A1, CTNNB1 (b-catenin), CTSB (cathepsin B), ERBB2 (Her-2), ESR1, ESR2, F3 (TF), FOSL1 (FRA-1), GATA3, GSN (Gelsolin), IGFBP2, IL2RA, IL6, IL6R, IL6ST (glycoprotein 130), ITGA6 (a6 integrin), JUN, KLK5, KRT19, MAP2K7 (c-Jun), MKI67 (Ki-67), NGFB (NGF), NGFR, NME1 (NM23A), PGR, PLAU (uPA), PTEN, SERPINB5 (maspin), SERPINE1 (PAI-1), TGFA, THBS1 (thrombospondin-1), TIE (Tie-1), TNFRSF6 (Fas), TNFSF6 (FasL), TOP2A (topoisomerase Ea), TP53, AZGP1 (zinc-a-glycoprotein), BPAG1 (plectin), CDKN1A (p21Wap1/Cipl), CLDN7 (claudin-7), CLU (clusterin), ERBB2 (Her-2), FGF1, FLRT1 (fibronectin), GABRP (GABAa), GNAS1, ID2, ITGA6 (a6 integrin), ITGB4 (b 4 integrin), KLF5 (GC Box BP), KRT19 (Keratin 19), KRTHB6 (hair-specific type II keratin), MACMARCKS, MT3 (metallothionectin-III), MUC1 (mucin), PTGS2 (COX-2), RAC2 (p21Rac2), S100A2, SCGB1D2 (lipophilin B), SCGB2A1 (mammaglobin 2), SCGB2A2 (mammaglobin 1), SPRR1B (Sprl), THBS1, THBS2, THBS4, and TNFAIP2 (B94), RON, c-Met, CD64, DLL4, PLGF, CTLA4, phophatidylserine, ROBO4, CD80, CD22, CD40, CD23, CD28, CD80, CD55, CD38, CD70, CD74, CD30, CD138, CD56, CD33, CD2, CD137, DR4, DR5, RANKL, VEGFR2, PDGFR, VEGFR1, MTSP1, MSP, EPHB2, EPHA1, EPHA2, EpCAM, PGE2, NKG2D, LPA, SIP, APRIL, BCMA, MAPG, FLT3, PDGFR alpha, PDGFR beta, ROR1, PSMA, PSCA, SCD1, and CD59.

### IV. Pharmaceutical Compositions

[0471] The invention also provides pharmaceutical compositions comprising a binding protein, of the invention and a pharmaceutically acceptable carrier. The pharmaceutical compositions comprising binding proteins of the invention are for use in, but not limited to, diagnosing, detecting, or monitoring a disorder, in preventing, treating, managing, or ameliorating of a disorder or one or more symptoms thereof, and/or in research. In a specific embodiment, a composition comprises one or more binding proteins of the invention. In another embodiment, the pharmaceutical composition comprises one or more binding proteins of the invention and one or more prophylactic or therapeutic agents other than binding proteins of the invention for treating a disorder. In an embodiment, the prophylactic or therapeutic agents known to be useful for or having been or currently being used in the prevention, treatment, management, or amelioration of a disorder or one or more symptoms thereof. In accordance with these embodiments, the composition may further comprise of a carrier, diluent or excipient.

[0472] The binding proteins of the invention can be incorporated into pharmaceutical compositions suitable for administration to a subject. Typically, the pharmaceutical composition comprises a binding protein of the invention and a pharmaceutically acceptable carrier. As used herein, “pharmaceutically acceptable carrier” includes any and all solvents, dispersion media, coatings, antibacterial and antifungal agents, isotonic and absorption delaying agents, and the like that are physiologically compatible. Examples of pharmaceutically acceptable carriers include one or more of water, saline, phosphate buffered saline, dextrose, glycerol, ethanol and the like, as well as combinations thereof. In some embodiments, isotonic agents, for example, sugars, polyalcohols such as mannitol, sorbitol, or sodium chloride, are included in the composition. Pharmaceutically acceptable carriers may further comprise minor amounts of auxiliary substances such as wetting or emulsifying agents, preservatives or buffers, which enhance the shelf life or effectiveness of the antibody or antibody portion.

[0473] Various delivery systems are known and can be used to administer one or more antibodies of the invention or the combination of one or more antibodies of the invention and a prophylactic agent or therapeutic agent useful for preventing, managing, treating, or ameliorating a disorder or one or more symptoms thereof, e.g., encapsulation in liposomes, microparticles, microcapsules, recombinant cells capable of expressing the antibody or antibody fragment, receptor-mediated endocytosis (see, e.g., Wu and Wu, J. Biol. Chem. 262:4429-4432 (1987)), construction of a nucleic acid as part of a retroviral or other vector, etc. Methods of administering a prophylactic or therapeutic agent of the invention include, but are not limited to, parenteral administration (e.g., intradermal, intramuscular, intraperitoneal, intravenous and subcutaneous), epidurala administration, intratumoral administration, and mucosal administration (e.g., intranasal and oral routes). In addition, pulmonary administration can be employed, e.g., by use of an inhaler or nebulizer, and formulation with an aerosolizing agent. See, e.g., U.S. Pat. Nos. 6,019,968; 5,985,320; 5,985,309; 5,934,272; 5,874,064; 5,855,913; 5,290,540; and 4,880,078; and PCT Publication Nos. WO 92/19244; WO 97/32572; WO 97/44013; WO 98/31346; and WO 99/66903, each of which is incorporated herein by reference their entireties. In one embodiment, a binding protein of the invention, combination therapy, or a composition of the invention is administered using Alkermes AIR® pulmonary drug delivery technology (Alkermes, Inc., Cambridge, Mass.). In a specific embodiment, prophylactic or therapeutic agents of the invention are administered intramuscularly, intravenously, intratumorally, orally, intranasally, pulmonary, or subcutaneously. The prophylactic or therapeutic agents may be administered by any convenient route, for example by infusion or bolus injection, by absorption through epithelial or mucocutaneous linings (e.g., oral mucosa, rectal and intestinal mucosa, etc.) and may be administered together with other biologically active agents. Administration can be systemic or local.

[0474] In an embodiment, specific binding of antibody-coupled carbon nanotubes (CNTs) to tumor cells in vitro, followed by their highly specific ablation with near-infrared (NIR) light can be used to target tumor cells. For example, biotinylated polar lipids can be used to prepare stable, biocompatible, noncytotoxic CNT dispersions that are then attached to one or two different neutralite avidin-derivatized DVD-Igs directed against one or more tumor antigens (e.g., CD22) (Chakravarty, P. et al. (2008) Proc. Natl. Acad. Sci. USA 105:8697-8702.

[0475] In a specific embodiment, it may be desirable to administer the prophylactic or therapeutic agents of the invention locally to the area in need of treatment; this may be achieved by, for example, and not by way of limitation, local infusion, by injection, or by means of an implant, said implant being of a porous or non-porous material, including membranes and matrices, such as sialastic membranes, polymers, fibrous matrices (e.g., Tissuel®), or collagen matrices. In one embodiment, an effective amount of one or more antibodies of the invention antagonists is administered locally to the affected area to a subject to prevent, treat, manage, and/or ameliorate a disorder or a symptom thereof. In another embodiment, an effective amount of one or more antibodies of the invention is administered locally to the affected area in combination with an effective amount of one or more therapies (e.g., one or more prophylactic or therapeutic agents) other than a binding protein of the invention of a subject to prevent, treat, manage, and/or ameliorate a disorder or one or more symptoms thereof.

[0476] In another embodiment, the prophylactic or therapeutic agent can be delivered in a controlled release or sustained release system. In one embodiment, a pump may be used to achieve controlled or sustained release (see Langer, supra; Sefton, 1987, CRC Crit. Ref Biomed. Eng. 14:20; Buchwald et al., 1980, Surgery 88:507; Saudek et al., 1989, N. Engl. J. Med. 321:574). In another embodiment, polymeric materials can be used to achieve controlled or sustained release of the therapies of the invention (see e.g., Medical Applications of Controlled Release, Langer and Wise (eds.), CRC Pres., Boca Raton, Fla. (1974); Controlled Drug Bioavailability, Drug Product Design and Performance, Smolen and Ball (eds.), Wiley, New York (1984); Ranger and Peppas, 1983, J., Macromol. Sci. Rev. Macromol. Chem. 23:61; see also Levy et al., 1985, Science 228:190; During et al., 1989, Ann. Neurol. 25:351; Howard et al., 1989, J. Neurosurg. 7 1:105); U.S. Pat. No. 5,679,377; U.S. Pat. No. 5,916,597; U.S. Pat. No. 5,912,015; U.S. Pat. No. 5,989,463; U.S. Pat. No. 5,128,326; PCT Publication No. WO 99/15154; and PCT Publication No. WO 99/20253. Examples of polymers used in sustained release formulations include, but are not limited to, poly(2-hydroxy ethyl methacrylate), poly(methyl methacrylate), poly(acrylic acid), poly(ethylene-co-vinyl acetate), poly(methacrylic acid), polyglycolides (PLG), polyanhydrides, poly(N-vinyl pyrrolidone), poly(vinyl alcohol), polyacrylamide, poly(ethylene glycol), polylactides (PLA), poly(lactide-co-glycolides) (PLGA), and polyorthoesters. In an embodiment, the polymer used in a sustained release formulation is inert, free of leachable impurities, stable on storage, sterile, and biodegradable. In yet another embodiment, a controlled or sustained release system can be placed in proximity of the prophylactic or therapeutic target, thus requiring only a fraction of the systemic dose (see, e.g., Goodson, in Medical Applications of Controlled Release, supra, vol. 2, pp. 115-138 (1984)).

[0477] Controlled release systems are discussed in the review by Langer (1990, Science 249:1527-1533). Any technique known to one of skill in the art can be used to produce sustained release formulations comprising one or more therapeutic agents of the invention. See, e.g., U.S. Pat. No. 4,526,938, PCT publication WO 91/05548, PCT publication WO 96/20698, Ning et al., 1996, “Intratumoral Radioimmunotheraphy of a Human Colon Cancer Xenograft Using a Sustained-Release Gel,” Radiotherapy &Oncology 39:179-189, Song et al., 1995, “Antibody Mediated Lung Targeting of Long-Circulating Emulsions,” PDA Journal of Pharmaceutical Science &Technology 50:372-397, Cleek et al., 1997, “Biodegradable Polymeric Carriers for a bFGF Antibody for Cardiovascular Application,” Pro. Int'l. Symp. Control. Rel. Bioact. Mater. 24:853-854, and Lam et al., 1997, “Microencapsulation of Recombinant Humanized Monoclonal Antibody for Local Delivery,” Proc. Int'l. Symp. Control Rel. Bioact. Mater. 24:759-760, each of which is incorporated herein by reference in their entireties.

[0478] In a specific embodiment, where the composition of the invention is a nucleic acid encoding a prophylactic or therapeutic agent, the nucleic acid can be administered in vivo to promote expression of its encoded prophylactic or therapeutic agent, by constructing it as part of an appropriate nucleic acid expression vector and administering it so that it becomes intracellular, e.g., by use of a retroviral vector (see U.S. Pat. No. 4,980,286), or by direct injection, or by use of microparticle bombardment (e.g., a gene gun; Biolistic, Dupont), or coating with lipids or cell-surface receptors or transfecting agents, or by administering it in linkage to a homeobox-like peptide which is known to enter the nucleus (see, e.g., Joliot et al., 1991, Proc. Natl. Acad. Sci. USA 88:1864-1868). Alternatively, a nucleic acid can be introduced intracellularly and incorporated within host cell DNA for expression by homologous recombination.

[0479] A pharmaceutical composition of the invention is formulated to be compatible with its intended route of administration. Examples of routes of administration include, but are not limited to, parenteral, e.g., intravenous, intradermal, subcutaneous, oral, intranasal (e.g., inhalation), transdermal (e.g., topical), transmucosal, and rectal administration. In a specific embodiment, the composition is formulated in accordance with routine procedures as a pharmaceutical composition adapted for intravenous, subcutaneous, intramuscular, oral, intranasal, or topical administration to human beings. Typically, compositions for intravenous administration are solutions in sterile isotonic aqueous buffer. Where necessary, the composition may also include a solubilizing agent and a local anesthetic such as lignocamne to ease pain at the site of the injection.

[0480] If the compositions of the invention are to be administered topically, the compositions can be formulated in the form of an ointment, cream, transdermal patch, lotion, gel, shampoo, spray, aerosol, solution, emulsion, or other form well-known to one of skill in the art. See, e.g., Remington's Pharmaceutical Sciences and Introduction to Pharmaceutical Dosage Forms, 19th ed., Mack Pub. Co., Easton, Pa. (1995). In an embodiment, for non-sprayable topical dosage forms, viscous to semi-solid or solid forms comprising a carrier or one or more excipients compatible with topical application and having a dynamic viscosity greater than water are employed. Suitable formulations include, without limitation, solutions, suspensions, emulsions, creams, ointments, powders, liniments, salves, and the like, which are, if desired, sterilized or mixed with auxiliary agents (e.g., preservatives, stabilizers, wetting agents, buffers, or salts) for influencing various properties, such as, for example, osmotic pressure. Other suitable topical dosage forms include sprayable aerosol preparations wherein the active ingredient, in an embodiment, in combination with a solid or liquid inert carrier, is packaged in a mixture with a pressurized volatile (e.g., a gaseous propellant, such as freon) or in a squeeze bottle. Moisturizers or humectants can also be added to pharmaceutical compositions and dosage forms if desired. Examples of such additional ingredients are well-known in the art.

[0481] If the method of the invention comprises intranasal administration of a composition, the composition can be formulated in an aerosol form, spray, mist or in the form of drops. In particular, prophylactic or therapeutic agents for use according to the present invention can be conveniently delivered in the form of an aerosol spray presentation from pressurized packs or a nebuliser, with the use of a suitable propellant (e.g., dichlorodifluoromethane, trichlorofluoromethane, dichlorotetrafluoroethane, carbon dioxide or other suitable gas). In the case of a pressurized aerosol the dosage unit may be determined by providing a valve to deliver a metered amount. Capsules and cartridges (composed of, e.g., gelatin) for use in an inhaler or insufflator may be formulated containing a powder mix of the compound and a suitable powder base such as lactose or starch.

[0482] If the method of the invention comprises oral administration, compositions can be formulated orally in the form of tablets, capsules, cachets, gelcaps, solutions, suspensions, and the like. Tablets or capsules can be prepared by conventional means with pharmaceutically acceptable excipients such as binding agents (e.g., pregelatinised maize starch, polyvinylpyrrolidone, or hydroxypropyl methylcellulose); fillers (e.g., lactose, microcrystalline cellulose, or calcium hydrogen phosphate); lubricants (e.g., magnesium stearate, talc, or silica); disintegrants (e.g., potato starch or sodium starch glycolate); or wetting agents (e.g., sodium lauryl sulphate). The tablets may be coated by methods well-known in the art. Liquid preparations for oral administration may take the form of, but not limited to, solutions, syrups or suspensions, or they may be presented as a dry product for constitution with water or other suitable vehicle before use. Such liquid preparations may be prepared by conventional means with pharmaceutically acceptable additives such as suspending agents (e.g., sorbitol syrup, cellulose derivatives, or hydrogenated edible fats); emulsifying agents (e.g., lecithin or acacia); non-aqueous vehicles (e.g., almond oil, oily esters, ethyl alcohol, or fractionated vegetable oils); and preservatives (e.g., methyl or propyl-p-hydroxybenzoates or sorbic acid). The preparations may also contain buffer salts, flavoring, coloring, and sweetening agents as appropriate. Preparations for oral administration may be suitably formulated for slow release, controlled release, or sustained release of a prophylactic or therapeutic agent(s).

[0483] The method of the invention may comprise pulmonary administration, e.g., by use of an inhaler or nebulizer, of a composition formulated with an aerosolizing agent. See, e.g., U.S. Pat. Nos. 6,019,968; 5,985,320; 5,985,309; 5,934,272; 5,874,064; 5,855,913; 5,290,540; and 4,880,078; and PCT Publication Nos. WO 92/19244; WO 97/32572; WO 97/44013; WO 98/31346; and WO 99/66903, each of which is incorporated herein by reference their entireties. In a specific embodiment, a binding protein of the invention, combination therapy, and/or composition of the invention is administered using Alkermes AIR® pulmonary drug delivery technology (Alkermes, Inc., Cambridge, Mass.).

[0484] The method of the invention may comprise administration of a composition formulated for parenteral administration by injection (e.g., by bolus injection or continuous infusion). Formulations for injection may be presented in unit dosage form (e.g., in ampoules or in multi-dose containers) with an added preservative. The compositions may take such forms as suspensions, solutions or emulsions in oily or aqueous vehicles, and may contain formulatory agents such as suspending, stabilizing and/or dispersing agents. Alternatively, the active ingredient may be in powder form for constitution with a suitable vehicle (e.g., sterile pyrogen-free water) before use.

[0485] The methods of the invention may additionally comprise of administration of compositions formulated as depot preparations. Such long acting formulations may be administered by implantation (e.g., subcutaneously or intramuscularly) or by intramuscular injection. Thus, for example, the compositions may be formulated with suitable polymeric or hydrophobic materials (e.g., as an emulsion in an acceptable oil) or ion exchange resins, or as sparingly soluble derivatives (e.g., as a sparingly soluble salt).

[0486] The methods of the invention encompasse administration of compositions formulated as neutral or salt forms. Pharmaceutically acceptable salts include those formed with anions such as those derived from hydrochloric, phosphoric, acetic, oxalic, tartaric acids, etc., and those formed with cations such as those derived from sodium, potassium, ammonium, calcium, ferric hydroxides, isopropylamine, triethylamine, 2-ethylamino ethanol, histidine, procaine, etc.

[0487] Generally, the ingredients of compositions are supplied either separately or mixed together in unit dosage form, for example, as a dry lyophilized powder or water free concentrate in a hermetically sealed container such as an ampoule or sachette indicating the quantity of active agent. Where the mode of administration is infusion, composition can be dispensed with an infusion bottle containing sterile pharmaceutical grade water or saline. Where the mode of administration is by injection, an ampoule of sterile water for injection or saline can be provided so that the ingredients may be mixed prior to administration.

[0488] In particular, the invention also provides that one or more of the prophylactic or therapeutic agents, or pharmaceutical compositions of the invention is packaged in a hermetically sealed container such as an ampoule or sachette indicating the quantity of the agent. In one embodiment, one or more of the prophylactic or therapeutic agents, or pharmaceutical compositions of the invention is supplied as a dry sterilized lyophilized powder or water free concentrate in a hermetically sealed container and can be reconstituted (e.g., with water or saline) to the appropriate concentration for administration to a subject. In an embodiment, one or more of the prophylactic or therapeutic agents or pharmaceutical compositions of the invention is supplied as a dry sterile lyophilized powder in a hermetically sealed container at a unit dosage of at least 5 mg, at least 10 mg, at least 15 mg, at least 25 mg, at least 35 mg, at least 45 mg, at least 50 mg, at least 75 mg, or at least 100 mg. The lyophilized prophylactic or therapeutic agents or pharmaceutical compositions of the invention should be stored at between 2° C. and 8° C. in its original container and the prophylactic or therapeutic agents, or pharmaceutical compositions of the invention should be administered within 1 week, e.g., within 5 days, within 72 hours, within 48 hours, within 24 hours, within 12 hours, within 6 hours, within 5 hours, within 3 hours, or within 1 hour after being reconstituted. In an alternative embodiment, one or more of the prophylactic or therapeutic agents or pharmaceutical compositions of the invention is supplied in liquid form in a hermetically sealed container indicating the quantity and concentration of the agent. In an embodiment, the liquid form of the administered composition is supplied in a hermetically sealed container at least 0.25 mg/ml, at least 0.5 mg/ml, at least 1 mg/ml, at least 2.5 mg/ml, at least 5 mg/ml, at least 8 mg/ml, at least 10 mg/ml, at least 15 mg/kg, at least 25 mg/ml, at least 50 mg/ml, at least 75 mg/ml or at least 100 mg/ml. The liquid form should be stored at between 2° C. and 8° C. in its original container.

[0489] The binding proteins of the invention can be incorporated into a pharmaceutical composition suitable for parenteral administration. In an embodiment, the antibody or antibody-portions will be prepared as an injectable solution containing 0.1-250 mg/ml binding protein. The injectable solution can be composed of either a liquid or lyophilized dosage form in a flint or amber vial, ampule or pre-filled syringe. The buffer can be L-histidine (1-50 mM), optimally 5-10 mM, at pH 5.0 to 7.0 (optimally pH 6.0). Other suitable buffers include but are not limited to, sodium succinate, sodium citrate, sodium phosphate or potassium phosphate. Sodium chloride can be used to modify the toxicity of the solution at a concentration of 0-300 mM (optimally 150 mM for a liquid dosage form). Cryoprotectants can be included for a lyophilized dosage form, principally 0-10% sucrose (optimally 0.5-1.0%). Other suitable cryoprotectants include trehalose and lactose. Bulking agents can be included for a lyophilized dosage form, principally 1-10% mannitol (optimally 2-4%). Stabilizers can be used in both liquid and lyophilized dosage forms, principally 1-50 mM L-Methionine (optimally 5-10 mM). Other suitable bulking agents include glycine, arginine, can be included as 0-0.05% polysorbate-80 (optimally 0.005-0.01%). Additional surfactants include but are not limited to polysorbate 20 and BRIJ surfactants. The pharmaceutical composition comprising the binding proteins of the invention prepared as an injectable solution for parenteral administration, can further comprise an agent useful as an adjuvant, such as those used to increase the absorption, or dispersion of a therapeutic protein (e.g., antibody). A particularly useful adjuvant is hyaluronidase, such as Hylenex® (recombinant human hyaluronidase). Addition of hyaluronidase in the injectable solution improves human bioavailability following parenteral administration, particularly subcutaneous administration. It also allows for greater injection site volumes (i.e. greater than 1 ml) with less pain and discomfort, and minimum incidence of injection site reactions. (see WO2004078140, and US2006104968 incorporated herein by reference).

[0490] The compositions of this invention may be in a variety of forms. These include, for example, liquid, semi-solid and solid dosage forms, such as liquid solutions (e.g., injectable and infusible solutions), dispersions or suspensions, tablets, pills, powders, liposomes and suppositories. The form chosen depends on the intended mode of administration and therapeutic application. Typical compositions are in the form of injectable or infusible solutions, such as compositions similar to those used for passive immunization of humans with other antibodies. The chosen mode of administration is parenteral (e.g., intravenous, subcutaneous, intraperitoneal, intramuscular). In an embodiment, the antibody is administered by intravenous infusion or injection. In another embodiment, the antibody is administered by intramuscular or subcutaneous injection.

[0491] Therapeutic compositions typically must be sterile and stable under the conditions of manufacture and storage. The composition can be formulated as a solution, microemulsion, dispersion, liposome, or other ordered structure suitable to high drug concentration. Sterile injectable solutions can be prepared by incorporating the active compound (i.e., antibody or antibody portion) in the required amount in an appropriate solvent with one or a combination of ingredients enumerated herein, as required, followed by filtered sterilization. Generally, dispersions are prepared by incorporating the active compound into a sterile vehicle that contains a basic dispersion medium and the required other ingredients from those enumerated herein. In the case of sterile, lyophilized powders for the preparation of sterile injectable solutions, the methods of preparation are vacuum drying and spray-drying that yields a powder of the active ingredient plus any additional desired ingredient from a previously sterile-filtered solution thereof. The proper fluidity of a solution can be maintained, for example, by the use of a coating such as lecithin, by the maintenance of the required particle size in the case of dispersion and by the use of surfactants. Prolonged absorption of injectable compositions can be brought about by including, in the composition, an agent that delays absorption, for example, monostearate salts and gelatin.

[0492] The binding proteins of the present invention can be administered by a variety of methods known in the art, although for many therapeutic applications, in an embodiment, the route/mode of administration is subcutaneous injection, intravenous injection or infusion. As will be appreciated by the skilled artisan, the route and/or mode of administration will vary depending upon the desired results. In certain embodiments, the active compound may be prepared with a carrier that will protect the compound against rapid release, such as a controlled release formulation, including implants, transdermal patches, and microencapsulated delivery systems. Biodegradable, biocompatible polymers can be used, such as ethylene vinyl acetate, polyanhydrides, polyglycolic acid, collagen, polyorthoesters, and polylactic acid. Many methods for the preparation of such formulations are patented or generally known to those skilled in the art. See, e.g., Sustained and Controlled Release Drug Delivery Systems, J. R. Robinson, ed., Marcel Dekker, Inc., New York, 1978.

[0493] In certain embodiments, a binding protein of the invention may be orally administered, for example, with an inert diluent or an assimilable edible carrier. The compound (and other ingredients, if desired) may also be enclosed in a hard or soft shell gelatin capsule, compressed into tablets, or incorporated directly into the subject's diet. For oral therapeutic administration, the compounds may be incorporated with excipients and used in the form of ingestible tablets, buccal tablets, troches, capsules, elixirs, suspensions, syrups, wafers, and the like. To administer a compound of the invention by other than parenteral administration, it may be necessary to coat the compound with, or co-administer the compound with, a material to prevent its inactivation.

[0494] Supplementary active compounds can also be incorporated into the compositions. In certain embodiments, a binding protein of the invention is coformulated with and/or coadministered with one or more additional therapeutic agents that are useful for treating disorders with binding protein of the invention. For example, a binding protein of the invention may be coformulated and/or coadministered with one or more additional antibodies that bind other targets (e.g., antibodies that bind other cytokines or that bind cell surface molecules). Furthermore, one or more antibodies of the invention may be used in combination with two or more of the foregoing therapeutic agents. Such combination therapies may advantageously utilize lower dosages of the administered therapeutic agents, thus avoiding possible toxicities or complications associated with the various monotherapies.

[0495] In certain embodiments, a binding protein is linked to a half-life extending vehicle known in the art. Such vehicles include, but are not limited to, the Fc domain, polyethylene glycol, and dextran. Such vehicles are described, e.g., in U.S. application Ser. No. 09/428,082 and published PCT Application No. WO 99/25044, which are hereby incorporated by reference for any purpose.

[0496] In a specific embodiment, nucleic acid sequences encoding a binding protein of the invention or another prophylactic or therapeutic agent of the invention are administered to treat, prevent, manage, or ameliorate a disorder or one or more symptoms thereof by way of gene therapy. Gene therapy refers to therapy performed by the administration to a subject of an expressed or expressible nucleic acid. In this embodiment of the invention, the nucleic acids produce their encoded antibody or prophylactic or therapeutic agent of the invention that mediates a prophylactic or therapeutic effect.

[0497] Any of the methods for gene therapy available in the art can be used according to the present invention. For general reviews of the methods of gene therapy, see Goldspiel et al., 1993, Clinical Pharmacy 12:488-505; Wu and Wu, 1991, Biotherapy 3:87-95; Tolstoshev, 1993, Ann. Rev. Pharmacol. Toxicol. 32:573-596; Mulligan, Science 260:926-932 (1993); and Morgan and Anderson, 1993, Ann. Rev. Biochem. 62:191-217; May, 1993, TIBTECH 11(5):155-215. Methods commonly known in the art of recombinant DNA technology which can be used are described in Ausubel et al. (eds.), Current Protocols in Molecular Biology, John Wiley &Sons, NY (1993); and Kriegler, Gene Transfer and Expression, A Laboratory Manual, Stockton Press, NY (1990). Detailed description of various methods of gene therapy are disclosed in US20050042664 A1 which is incorporated herein by reference.

[0498] The binding proteins of the invention are useful in treating various diseases wherein the targets that are recognized by the binding proteins are detrimental. Such diseases include, but are not limited to, rheumatoid arthritis, osteoarthritis, juvenile chronic arthritis, septic arthritis, Lyme arthritis, psoriatic arthritis, reactive arthritis, spondyloarthropathy, systemic lupus erythematosus, Crohn's disease, ulcerative colitis, inflammatory bowel disease, insulin dependent diabetes mellitus, thyroiditis, asthma, allergic diseases, psoriasis, dermatitis scleroderma, graft versus host disease, organ transplant rejection, acute or chronic immune disease associated with organ transplantation, sarcoidosis, atherosclerosis, disseminated intravascular coagulation, Kawasaki's disease, Grave's disease, nephrotic syndrome, chronic fatigue syndrome, Wegener's granulomatosis, Henoch-Schoenlein purpurea, microscopic vasculitis of the kidneys, chronic active hepatitis, uveitis, septic shock, toxic shock syndrome, sepsis syndrome, cachexia, infectious diseases, parasitic diseases, acquired immunodeficiency syndrome, acute transverse myelitis, Huntington's chorea, Parkinson's disease, Alzheimer's disease, stroke, primary biliary cirrhosis, hemolytic anemia, malignancies, heart failure, myocardial infarction, Addison's disease, sporadic, polyglandular deficiency type I and polyglandular deficiency type II, Schmidt's syndrome, adult (acute) respiratory distress syndrome, alopecia, alopecia greata, seronegative arthopathy, arthropathy, Reiter's disease, psoriatic arthropathy, ulcerative colitic arthropathy, enteropathic synovitis, chlamydia, yersinia and salmonella associated arthropathy, spondyloarthopathy, atheromatous disease/arteriosclerosis, atopic allergy, autoimmune bullous disease, pemphigus vulgaris, pemphigus foliaceus, pemphigoid, linear IgA disease, autoimmune haemolytic anaemia, Coombs positive haemolytic anaemia, acquired pernicious anaemia, juvenile pernicious anaemia, myalgic encephalitis/Royal Free Disease, chronic mucocutaneous candidiasis, giant cell arteritis, primary sclerosing hepatitis, cryptogenic autoimmune hepatitis, Acquired Immunodeficiency Disease Syndrome, Acquired Immunodeficiency Related Diseases, Hepatitis B, Hepatitis C, common varied immunodeficiency (common variable hypogammaglobulinaemia), dilated cardiomyopathy, female infertility, ovarian failure, premature ovarian failure, fibrotic lung disease, cryptogenic fibrosing alveolitis, post-inflammatory interstitial lung disease, interstitial pneumonitis, connective tissue disease associated interstitial lung disease, mixed connective tissue disease associated lung disease, systemic sclerosis associated interstitial lung disease, rheumatoid arthritis associated interstitial lung disease, systemic lupus erythematosus associated lung disease, dermatomyositis/polymyositis associated lung disease, Sjögren's disease associated lung disease, ankylosing spondylitis associated lung disease, vasculitic diffuse lung disease, haemosiderosis associated lung disease, drug-induced interstitial lung disease, fibrosis, radiation fibrosis, bronchiolitis obliterans, chronic eosinophilic pneumonia, lymphocytic infiltrative lung disease, postinfectious interstitial lung disease, gouty arthritis, autoimmune hepatitis, type-1 autoimmune hepatitis (classical autoimmune or lupoid hepatitis), type-2 autoimmune hepatitis (anti-LKM antibody hepatitis), autoimmune mediated hypoglycaemia, type B insulin resistance with acanthosis nigricans, hypoparathyroidism, acute immune disease associated with organ transplantation, chronic immune disease associated with organ transplantation, osteoarthrosis, primary sclerosing cholangitis, psoriasis type 1, psoriasis type 2, idiopathic leucopaenia, autoimmune neutropaenia, renal disease NOS, glomerulonephritides, microscopic vasulitis of the kidneys, lyme disease, discoid lupus erythematosus, male infertility idiopathic or NOS, sperm autoimmunity, multiple sclerosis (all subtypes), sympathetic ophthalmia, pulmonary hypertension secondary to connective tissue disease, Goodpasture's syndrome, pulmonary manifestation of polyarteritis nodosa, acute rheumatic fever, rheumatoid spondylitis, Still's disease, systemic sclerosis, Sjögren's syndrome, Takayasu's disease/arteritis, autoimmune thrombocytopaenia, idiopathic thrombocytopaenia, autoimmune thyroid disease, hyperthyroidism, goitrous autoimmune hypothyroidism (Hashimoto's disease), atrophic autoimmune hypothyroidism, primary myxoedema, phacogenic uveitis, primary vasculitis, vitiligo acute liver disease, chronic liver diseases, alcoholic cirrhosis, alcohol-induced liver injury, choleosatatis, idiosyncratic liver disease, Drug-Induced hepatitis, Non-alcoholic Steatohepatitis, allergy and asthma, group B streptococci (GBS) infection, mental disorders (e.g., depression and schizophrenia), Th2 Type and Th1 Type mediated diseases, acute and chronic pain (different forms of pain), and cancers such as lung, breast, stomach, bladder, colon, pancreas, ovarian, prostate and rectal cancer and hematopoietic malignancies (leukemia and lymphoma), Abetalipoprotemia, Acrocyanosis, acute and chronic parasitic or infectious processes, acute leukemia, acute lymphoblastic leukemia (ALL), acute myeloid leukemia (AML), acute or chronic bacterial infection, acute pancreatitis, acute renal failure, adenocarcinomas, aerial ectopic beats, AIDS dementia complex, alcohol-induced hepatitis, allergic conjunctivitis, allergic contact dermatitis, allergic rhinitis, allograft rejection, alpha-1-antitrypsin deficiency, amyotrophic lateral sclerosis, anemia, angina pectoris, anterior horn cell degeneration, anti cd3 therapy, antiphospholipid syndrome, anti-receptor hypersensitivity reactions, aordic and peripheral aneuryisms, aortic dissection, arterial hypertension, arteriosclerosis, arteriovenous fistula, ataxia, atrial fibrillation (sustained or paroxysmal), atrial flutter, atrioventricular block, B cell lymphoma, bone graft rejection, bone marrow transplant (BMT) rejection, bundle branch block, Burkitt's lymphoma, Burns, cardiac arrhythmias, cardiac stun syndrome, cardiac tumors, cardiomyopathy, cardiopulmonary bypass inflammation response, cartilage transplant rejection, cerebellar cortical degenerations, cerebellar disorders, chaotic or multifocal atrial tachycardia, chemotherapy associated disorders, chromic myelocytic leukemia (CML), chronic alcoholism, chronic inflammatory pathologies, chronic lymphocytic leukemia (CLL), chronic obstructive pulmonary disease (COPD), chronic salicylate intoxication, colorectal carcinoma, congestive heart failure, conjunctivitis, contact dermatitis, cor pulmonale, coronary artery disease, Creutzfeldt-Jakob disease, culture negative sepsis, cystic fibrosis, cytokine therapy associated disorders, Dementia pugilistica, demyelinating diseases, dengue hemorrhagic fever, dermatitis, dermatologic conditions, diabetes, diabetes mellitus, diabetic ateriosclerotic disease, Diffuse Lewy body disease, dilated congestive cardiomyopathy, disorders of the basal ganglia, Down's Syndrome in middle age, drug-induced movement disorders induced by drugs which block CNS dopamine receptors, drug sensitivity, eczema, encephalomyelitis, endocarditis, endocrinopathy, epiglottitis, epstein-barr virus infection, erythromelalgia, extrapyramidal and cerebellar disorders, familial hematophagocytic lymphohistiocytosis, fetal thymus implant rejection, Friedreich's ataxia, functional peripheral arterial disorders, fungal sepsis, gas gangrene, gastric ulcer, glomerular nephritis, graft rejection of any organ or tissue, gram negative sepsis, gram positive sepsis, granulomas due to intracellular organisms, hairy cell leukemia, Hallervorden-Spatz disease, hashimoto's thyroiditis, hay fever, heart transplant rejection, hemachromatosis, hemodialysis, hemolytic uremic syndrome/thrombolytic thrombocytopenic purpura, hemorrhage, hepatitis (A), His bundle arrythmias, HIV infection/HIV neuropathy, Hodgkin's disease, hyperkinetic movement disorders, hypersensitity reactions, hypersensitivity pneumonitis, hypertension, hypokinetic movement disorders, hypothalamic-pituitary-adrenal axis evaluation, idiopathic Addison's disease, idiopathic pulmonary fibrosis, antibody mediated cytotoxicity, Asthenia, infantile spinal muscular atrophy, inflammation of the aorta, influenza a, ionizing radiation exposure, iridocyclitis/uveitis/optic neuritis, ischemia-reperfusion injury, ischemic stroke, juvenile rheumatoid arthritis, juvenile spinal muscular atrophy, Kaposi's sarcoma, kidney transplant rejection, legionella, leishmaniasis, leprosy, lesions of the corticospinal system, lipedema, liver transplant rejection, lymphederma, malaria, malignamt Lymphoma, malignant histiocytosis, malignant melanoma, meningitis, meningococcemia, metabolic/idiopathic, migraine headache, mitochondrial multi.system disorder, mixed connective tissue disease, monoclonal gammopathy, multiple myeloma, multiple systems degenerations (Mencel Dejerine-Thomas Shi-Drager and Machado-Joseph), myasthenia gravis, mycobacterium avium intracellulare, mycobacterium tuberculosis, myelodyplastic syndrome, myocardial infarction, myocardial ischemic disorders, nasopharyngeal carcinoma, neonatal chronic lung disease, nephritis, nephrosis, neurodegenerative diseases, neurogenic I muscular atrophies, neutropenic fever, non-hodgkins lymphoma, occlusion of the abdominal aorta and its branches, occulsive arterial disorders, okt3 therapy, orchitis/epidydimitis, orchitis/vasectomy reversal procedures, organomegaly, osteoporosis, pancreas transplant rejection, pancreatic carcinoma, paraneoplastic syndrome/hypercalcemia of malignancy, parathyroid transplant rejection, pelvic inflammatory disease, perennial rhinitis, pericardial disease, peripheral atherlosclerotic disease, peripheral vascular disorders, peritonitis, pernicious anemia, pneumocystis carinii pneumonia, pneumonia, POEMS syndrome (polyneuropathy, organomegaly, endocrinopathy, monoclonal gammopathy, and skin changes syndrome), post perfusion syndrome, post pump syndrome, post-MI cardiotomy syndrome, preeclampsia, Progressive supranucleo Palsy, primary pulmonary hypertension, radiation therapy, Raynaud's phenomenon and disease, Raynoud's disease, Refsum's disease, regular narrow QRS tachycardia, renovascular hypertension, reperfusion injury, restrictive cardiomyopathy, sarcomas, scleroderma, senile chorea, Senile Dementia of Lewy body type, seronegative arthropathies, shock, sickle cell anemia, skin allograft rejection, skin changes syndrome, small bowel transplant rejection, solid tumors, specific arrythmias, spinal ataxia, spinocerebellar degenerations, streptococcal myositis, structural lesions of the cerebellum, Subacute sclerosing panencephalitis, Syncope, syphilis of the cardiovascular system, systemic anaphalaxis, systemic inflammatory response syndrome, systemic onset juvenile rheumatoid arthritis, T-cell or FAB ALL, Telangiectasia, thromboangitis obliterans, thrombocytopenia, toxicity, transplants, trauma/hemorrhage, type III hypersensitivity reactions, type IV hypersensitivity, unstable angina, uremia, urosepsis, urticaria, valvular heart diseases, varicose veins, vasculitis, venous diseases, venous thrombosis, ventricular fibrillation, viral and fungal infections, vital encephalitis/aseptic meningitis, vital-associated hemaphagocytic syndrome, Wernicke-Korsakoff syndrome, Wilson's disease, xenograft rejection of any organ or tissue. (see Peritt et al. PCT publication No. WO2002097048A2, Leonard et al., PCT publication No. WO9524918 A1, and Salfeld et al., PCT publication No. WO00/56772A1).

[0499] The binding proteins of the invention can be used to treat humans suffering from autoimmune diseases, in particular those associated with inflammation, including, rheumatoid arthritis, spondylitis, allergy, autoimmune diabetes, autoimmune uveitis. In an embodiment, the binding proteins of the invention or antigen-binding portions thereof, are used to treat rheumatoid arthritis, Crohn's disease, multiple sclerosis, insulin dependent diabetes mellitus and psoriasis.

[0500] In an embodiment, diseases that can be treated or diagnosed with the compositions and methods of the invention include, but are not limited to, primary and metastatic cancers, including carcinomas of breast, colon, rectum, lung, oropharynx, hypopharynx, esophagus, stomach, pancreas, liver, gallbladder and bile ducts, small intestine, urinary tract (including kidney, bladder and urothelium), female genital tract (including cervix, uterus, and ovaries as well as choriocarcinoma and gestational trophoblastic disease), male genital tract (including prostate, seminal vesicles, testes and germ cell tumors), endocrine glands (including the thyroid, adrenal, and pituitary glands), and skin, as well as hemangiomas, melanomas, sarcomas (including those arising from bone and soft tissues as well as Kaposi's sarcoma), tumors of the brain, nerves, eyes, and meninges (including astrocytomas, gliomas, glioblastomas, retinoblastomas, neuromas, neuroblastomas, Schwannomas, and meningiomas), solid tumors arising from hematopoietic malignancies such as leukemias, and lymphomas (both Hodgkin's and non-Hodgkin's lymphomas).

[0501] In an embodiment, the antibodies of the invention or antigen-binding portions thereof, are used to treat cancer or in the prevention of metastases from the tumors described herein either when used alone or in combination with radiotherapy and/or other chemotherapeutic agents.

[0502] The antibodies of the invention, or antigen binding portions thereof, may be combined with agents that include but are not limited to, antineoplastic agents, radiotherapy, chemotherapy such as DNA alkylating agents, cisplatin, carboplatin, anti-tubulin agents, paclitaxel, docetaxel, taxol, doxorubicin, gemcitabine, gemzar, anthracyclines, adriamycin, topoisomerase I inhibitors, topoisomerase II inhibitors, 5-fluorouracil (5-FU), leucovorin, irinotecan, receptor tyrosine kinase inhibitors (e.g., erlotinib, gefitinib), COX-2 inhibitors (e.g., celecoxib), kinase inhibitors, and siRNAs.

[0503] A binding protein of the invention also can be administered with one or more additional therapeutic agents useful in the treatment of various diseases.

[0504] A binding protein of the invention can be used alone or in combination to treat such diseases. It should be understood that the binding proteins can be used alone or in combination with an additional agent, e.g., a therapeutic agent, said additional agent being selected by the skilled artisan for its intended purpose. For example, the additional agent can be a therapeutic agent art-recognized as being useful to treat the disease or condition being treated by the antibody of the present invention. The additional agent also can be an agent that imparts a beneficial attribute to the therapeutic composition e.g., an agent which effects the viscosity of the composition.

[0505] It should further be understood that the combinations which are to be included within this invention are those combinations useful for their intended purpose. The agents set forth below are illustrative for purposes and not intended to be limited. The combinations, which are part of this invention, can be the antibodies of the present invention and at least one additional agent selected from the lists below. The combination can also include more than one additional agent, e.g., two or three additional agents if the combination is such that the formed composition can perform its intended function.

[0506] Combinations to treat autoimmune and inflammatory diseases are non-steroidal anti-inflammatory drug(s) also referred to as NSAIDS which include drugs like ibuprofen. Other combinations are corticosteroids including prednisolone; the well known side-effects of steroid use can be reduced or even eliminated by tapering the steroid dose required when treating patients in combination with the DVD Igs of this invention. Non-limiting examples of therapeutic agents for rheumatoid arthritis with which an antibody, or antibody portion, of the invention can be combined include the following: cytokine suppressive anti-inflammatory drug(s) (CSAIDs); antibodies to or antagonists of other human cytokines or growth factors, for example, TNF, LT, IL-1, IL-2, IL-3, IL-4, IL-5, IL-6, IL-7, IL-8, IL-15, IL-16, IL-18, IL-21, IL-23, interferons, EMAP-II, GM-CSF, FGF, and PDGF. Binding proteins of the invention, or antigen binding portions thereof, can be combined with antibodies to cell surface molecules such as CD2, CD3, CD4, CD8, CD25, CD28, CD30, CD40, CD45, CD69, CD80 (B7.1), CD86 (B7.2), CD90, CTLA or their ligands including CD154 (gp39 or CD40L).

[0507] Combinations of therapeutic agents may interfere at different points in the autoimmune and subsequent inflammatory cascade; examples include TNF antagonists like chimeric, humanized or human TNF antibodies, ADALIMUMAB, (PCT Publication No. WO 97/29131), CA2 (Remicade™), CDP 571, and soluble p55 or p75 TNF receptors, derivatives, thereof, (p75TNFR1gG (Enbrel™) or p55TNFR1gG (Lenercept), and also TNF ix converting enzyme (TACE) inhibitors; similarly IL-1 inhibitors (Interleukin-1-converting enzyme inhibitors, IL-1RA etc.) may be effective for the same reason. Other combinations include Interleukin 11. Yet another combination include key players of the autoimmune response which may act parallel to, dependent on or in concert with IL-12 function; especially are IL-18 antagonists including IL-18 antibodies or soluble IL-18 receptors, or IL-18 binding proteins. It has been shown that IL-12 and IL-18 have overlapping but distinct functions and a combination of antagonists to both may be most effective. Yet another combination are non-depleting anti-CD4 inhibitors. Yet other combinations include antagonists of the co-stimulatory pathway CD80 (B7.1) or CD86 (B7.2) including antibodies, soluble receptors or antagonistic ligands.

[0508] The binding proteins of the invention may also be combined with agents, such as methotrexate, 6-MP, azathioprine sulphasalazine, mesalazine, olsalazine chloroquinine/hydroxychloroquine, pencillamine, aurothiomalate (intramuscular and oral), azathioprine, cochicine, corticosteroids (oral, inhaled and local injection), beta-2 adrenoreceptor agonists (salbutamol, terbutaline, salmeteral), xanthines (theophylline, aminophylline), cromoglycate, nedocromil, ketotifen, ipratropium and oxitropium, cyclosporin, FK506, rapamycin, mycophenolate mofetil, leflunomide, NSAIDs, for example, ibuprofen, corticosteroids such as prednisolone, phosphodiesterase inhibitors, adensosine agonists, antithrombotic agents, complement inhibitors, adrenergic agents, agents which interfere with signalling by proinflammatory cytokines such as TNF-α or IL-1 (e.g., IRAK, NIK, IKK, p38 or MAP kinase inhibitors), IL-1β converting enzyme inhibitors, TNFα converting enzyme (TACE) inhibitors, T-cell signalling inhibitors such as kinase inhibitors, metalloproteinase inhibitors, sulfasalazine, azathioprine, 6-mercaptopurines, angiotensin converting enzyme inhibitors, soluble cytokine receptors and derivatives thereof (e.g., soluble p55 or p75 TNF receptors and the derivatives p75TNFRIgG (Enbrel™ and p55TNFRIgG (Lenercept)), sIL-1RI, sIL-1RII, sIL-6R), antiinflammatory cytokines (e.g., IL-4, IL-10, IL-11, IL-13 and TGFβ), celecoxib, folic acid, hydroxychloroquine sulfate, rofecoxib, etanercept, infliximab, naproxen, valdecoxib, sulfasalazine, methylprednisolone, meloxicam, methylprednisolone acetate, gold sodium thiomalate, aspirin, triamcinolone acetonide, propoxyphene napsylate/apap, folate, nabumetone, diclofenac, piroxicam, etodolac, diclofenac sodium, oxaprozin, oxycodone hcl, hydrocodone bitartrate/apap, diclofenac sodium/misoprostol, fentanyl, anakinra, human recombinant, tramadol hcl, salsalate, sulindac, cyanocobalamin/fa/pyridoxine, acetaminophen, alendronate sodium, prednisolone, morphine sulfate, lidocaine hydrochloride, indomethacin, glucosamine sulf/chondroitin, amitriptyline hcl, sulfadiazine, oxycodone hcl/acetaminophen, olopatadine hcl, misoprostol, naproxen sodium, omeprazole, cyclophosphamide, rituximab, IL-1 TRAP, MRA, CTLA4-IG, IL-18 BP, anti-IL-18, Anti-IL15, BIRB-796, SCIO-469, VX-702, AMG-548, VX-740, Roflumilast, IC-485, CDC-801, and Mesopram. Combinations include methotrexate or leflunomide and in moderate or severe rheumatoid arthritis cases, cyclosporine.

[0509] Nonlimiting additional agents which can also be used in combination with a binding protein to treat rheumatoid arthritis include, but are not limited to, the following: non-steroidal anti-inflammatory drug(s) (NSAIDs); cytokine suppressive anti-inflammatory drug(s) (CSAIDs); CDP-571/BAY-10-3356 (humanized anti-TNFα antibody; Celltech/Bayer); cA2/infliximab (chimeric anti-TNFα antibody; Centocor); 75 kdTNFR-IgG/etanercept (75 kD TNF receptor-IgG fusion protein; Immunex; see e.g., Arthritis & Rheumatism (1994) Vol. 37, S295; J. Invest. Med. (1996) Vol. 44, 235A); 55 kdTNF-IgG (55 kD TNF receptor-IgG fusion protein; Hoffmann-LaRoche); IDEC-CE9.1/SB 210396 (non-depleting primatized anti-CD4 antibody; IDEC/SmithKline; see e.g., Arthritis & Rheumatism (1995) Vol. 38, S185); DAB 486-IL-2 and/or DAB 389-IL-2 (IL-2 fusion proteins; Seragen; see e.g., Arthritis & Rheumatism (1993) Vol. 36, 1223); Anti-Tac (humanized anti-IL-2Ra; Protein Design Labs/Roche); IL-4 (anti-inflammatory cytokine; DNAX/Schering); IL-10 (SCH 52000; recombinant IL-10, anti-inflammatory cytokine; DNAX/Schering); IL-4; IL-10 and/or IL-4 agonists (e.g., agonist antibodies); IL-1RA (IL-1 receptor antagonist; Synergen/Amgen); anakinra (Kineret®/Amgen); TNF-bp/s-TNF (soluble TNF binding protein; see e.g., Arthritis & Rheumatism (1996) Vol. 39, No. 9 (supplement), 5284; Amer. J. Physiol.—Heart and Circulatory Physiology (1995) Vol. 268, pp. 37-42); R973401 (phosphodiesterase Type IV inhibitor; see e.g., Arthritis & Rheumatism (1996) Vol. 39, No. 9 (supplement), S282); MK-966 (COX-2 Inhibitor; see e.g., Arthritis & Rheumatism (1996) Vol. 39, No. 9 (supplement), S81); Iloprost (see e.g., Arthritis & Rheumatism (1996) Vol. 39, No. 9 (supplement), S82); methotrexate; thalidomide (see e.g., Arthritis & Rheumatism (1996) Vol. 39, No. 9 (supplement), 5282) and thalidomide-related drugs (e.g., Celgen); leflunomide (anti-inflammatory and cytokine inhibitor; see e.g., Arthritis & Rheumatism (1996) Vol. 39, No. 9 (supplement), 5131; Inflammation Research (1996) Vol. 45, pp. 103-107); tranexamic acid (inhibitor of plasminogen activation; see e.g., Arthritis & Rheumatism (1996) Vol. 39, No. 9 (supplement), S284); T-614 (cytokine inhibitor; see e.g., Arthritis & Rheumatism (1996) Vol. 39, No. 9 (supplement), S282); prostaglandin E1 (see e.g., Arthritis & Rheumatism (1996) Vol. 39, No. 9 (supplement), S282); Tenidap (non-steroidal anti-inflammatory drug; see e.g., Arthritis & Rheumatism (1996) Vol. 39, No. 9 (supplement), S280); Naproxen (non-steroidal anti-inflammatory drug; see e.g., Neuro Report (1996) Vol. 7, pp. 1209-1213); Meloxicam (non-steroidal anti-inflammatory drug); Ibuprofen (non-steroidal anti-inflammatory drug); Piroxicam (non-steroidal anti-inflammatory drug); Diclofenac (non-steroidal anti-inflammatory drug); Indomethacin (non-steroidal anti-inflammatory drug); Sulfasalazine (see e.g., Arthritis & Rheumatism (1996) Vol. 39, No. 9 (supplement), S281); Azathioprine (see e.g., Arthritis & Rheumatism (1996) Vol. 39, No. 9 (supplement), S281); ICE inhibitor (inhibitor of the enzyme interleukin-1β converting enzyme); zap-70 and/or lck inhibitor (inhibitor of the tyrosine kinase zap-70 or lck); VEGF inhibitor and/or VEGF-R inhibitor (inhibitors of vascular endothelial cell growth factor or vascular endothelial cell growth factor receptor; inhibitors of angiogenesis); corticosteroid anti-inflammatory drugs (e.g., SB203580); TNF-convertase inhibitors; anti-IL-12 antibodies; anti-IL-18 antibodies; interleukin-11 (see e.g., Arthritis & Rheumatism (1996) Vol. 39, No. 9 (supplement), S296); interleukin-13 (see e.g., Arthritis & Rheumatism (1996) Vol. 39, No. 9 (supplement), S308); interleukin-17 inhibitors (see e.g., Arthritis & Rheumatism (1996) Vol. 39, No. 9 (supplement), S120); gold; penicillamine; chloroquine; chlorambucil; hydroxychloroquine; cyclosporine; cyclophosphamide; total lymphoid irradiation; anti-thymocyte globulin; anti-CD4 antibodies; CD5-toxins; orally-administered peptides and collagen; lobenzarit disodium; Cytokine Regulating Agents (CRAs) HP228 and HP466 (Houghten Pharmaceuticals, Inc.); ICAM-1 antisense phosphorothioate oligo-deoxynucleotides (ISIS 2302; Isis Pharmaceuticals, Inc.); soluble complement receptor 1 (TP10; T Cell Sciences, Inc.); prednisone; orgotein; glycosaminoglycan polysulphate; minocycline; anti-IL2R antibodies; marine and botanical lipids (fish and plant seed fatty acids; see e.g., DeLuca et al. (1995) Rheum. Dis. Clin. North Am. 21:759-777); auranofin; phenylbutazone; meclofenamic acid; flufenamic acid; intravenous immune globulin; zileuton; azaribine; mycophenolic acid (RS-61443); tacrolimus (FK-506); sirolimus (rapamycin); amiprilose (therafectin); cladribine (2-chlorodeoxyadenosine); methotrexate; bcl-2 inhibitors (see Bruncko, Milan et al., Journal of Medicinal Chemistry (2007), 50(4), 641-662); antivirals and immune modulating agents.

[0510] In one embodiment, the binding protein or antigen-binding portion thereof, is administered in combination with one of the following agents for the treatment of rheumatoid arthritis: small molecule inhibitor of KDR, small molecule inhibitor of Tie-2; methotrexate; prednisone; celecoxib; folic acid; hydroxychloroquine sulfate; rofecoxib; etanercept; infliximab; leflunomide; naproxen; valdecoxib; sulfasalazine; methylprednisolone; ibuprofen; meloxicam; methylprednisolone acetate; gold sodium thiomalate; aspirin; azathioprine; triamcinolone acetonide; propxyphene napsylate/apap; folate; nabumetone; diclofenac; piroxicam; etodolac; diclofenac sodium; oxaprozin; oxycodone hcl; hydrocodone bitartrate/apap; diclofenac sodium/misoprostol; fentanyl; anakinra, human recombinant; tramadol hcl; salsalate; sulindac; cyanocobalamin/fa/pyridoxine; acetaminophen; alendronate sodium; prednisolone; morphine sulfate; lidocaine hydrochloride; indomethacin; glucosamine sulfate/chondroitin; cyclosporine; amitriptyline hcl; sulfadiazine; oxycodone hcl/acetaminophen; olopatadine hcl; misoprostol; naproxen sodium; omeprazole; mycophenolate mofetil; cyclophosphamide; rituximab; IL-1 TRAP; MRA; CTLA4-IG; IL-18 BP; IL-12/23; anti-IL 18; anti-IL 15; BIRB-796; SCIO-469; VX-702; AMG-548; VX-740; Roflumilast; IC-485; CDC-801; and mesopram.

[0511] Non-limiting examples of therapeutic agents for inflammatory bowel disease with which a binding protein of the invention can be combined include the following: budenoside; epidermal growth factor; corticosteroids; cyclosporin, sulfasalazine; aminosalicylates; 6-mercaptopurine; azathioprine; metronidazole; lipoxygenase inhibitors; mesalamine; olsalazine; balsalazide; antioxidants; thromboxane inhibitors; IL-1 receptor antagonists; anti-IL-1β mAbs; anti-IL-6 mAbs; growth factors; elastase inhibitors; pyridinyl-imidazole compounds; antibodies to or antagonists of other human cytokines or growth factors, for example, TNF, LT, IL-1, IL-2, IL-6, IL-7, IL-8, IL-15, IL-16, IL-17, IL-18, EMAP-II, GM-CSF, FGF, and PDGF. Antibodies of the invention, or antigen binding portions thereof, can be combined with antibodies to cell surface molecules such as CD2, CD3, CD4, CD8, CD25, CD28, CD30, CD40, CD45, CD69, CD90 or their ligands. The antibodies of the invention, or antigen binding portions thereof, may also be combined with agents, such as methotrexate, cyclosporin, FK506, rapamycin, mycophenolate mofetil, leflunomide, NSAIDs, for example, ibuprofen, corticosteroids such as prednisolone, phosphodiesterase inhibitors, adenosine agonists, antithrombotic agents, complement inhibitors, adrenergic agents, agents which interfere with signalling by proinflammatory cytokines such as TNFα or IL-1 (e.g., IRAK, NIK, IKK, p38 or MAP kinase inhibitors), IL-1β converting enzyme inhibitors, TNFα converting enzyme inhibitors, T-cell signalling inhibitors such as kinase inhibitors, metalloproteinase inhibitors, sulfasalazine, azathioprine, 6-mercaptopurines, angiotensin converting enzyme inhibitors, soluble cytokine receptors and derivatives thereof (e.g., soluble p55 or p75 TNF receptors, sIL-1RI, sIL-1RII, sIL-6R) and antiinflammatory cytokines (e.g., IL-4, IL-10, IL-11, IL-13 and TGFβ) and bcl-2 inhibitors.

[0512] Examples of therapeutic agents for Crohn's disease in which a binding protein can be combined include the following: TNF antagonists, for example, anti-TNF antibodies, ADALIMUMAB (PCT Publication No. WO 97/29131; HUMIRA), CA2 (REMICADE), CDP 571, TNFR-Ig constructs, (p75TNFRIgG (ENBREL) and p55TNFRIgG (LENERCEPT)) inhibitors and PDE4 inhibitors. Antibodies of the invention, or antigen binding portions thereof, can be combined with corticosteroids, for example, budenoside and dexamethasone. Binding proteins of the invention or antigen binding portions thereof, may also be combined with agents such as sulfasalazine, 5-aminosalicylic acid and olsalazine, and agents which interfere with synthesis or action of proinflammatory cytokines such as IL-1, for example, IL-1β converting enzyme inhibitors and IL-1ra. Antibodies of the invention or antigen binding portion thereof may also be used with T cell signaling inhibitors, for example, tyrosine kinase inhibitors 6-mercaptopurines. Binding proteins of the invention, or antigen binding portions thereof, can be combined with IL-11. Binding proteins of the invention, or antigen binding portions thereof, can be combined with mesalamine, prednisone, azathioprine, mercaptopurine, infliximab, methylprednisolone sodium succinate, diphenoxylate/atrop sulfate, loperamide hydrochloride, methotrexate, omeprazole, folate, ciprofloxacin/dextrose-water, hydrocodone bitartrate/apap, tetracycline hydrochloride, fluocinonide, metronidazole, thimerosal/boric acid, cholestyramine/sucrose, ciprofloxacin hydrochloride, hyoscyamine sulfate, meperidine hydrochloride, midazolam hydrochloride, oxycodone hcl/acetaminophen, promethazine hydrochloride, sodium phosphate, sulfamethoxazole/trimethoprim, celecoxib, polycarbophil, propoxyphene napsylate, hydrocortisone, multivitamins, balsalazide disodium, codeine phosphate/apap, colesevelam hcl, cyanocobalamin, folic acid, levofloxacin, methylprednisolone, natalizumab and interferon-gamma

[0513] Non-limiting examples of therapeutic agents for multiple sclerosis with which binding proteins of the invention can be combined include the following: corticosteroids; prednisolone; methylprednisolone; azathioprine; cyclophosphamide; cyclosporine; methotrexate; 4-aminopyridine; tizanidine; interferon-β1a (AVONEX; Biogen); interferon-β1b (BETASERON; Chiron/Berlex); interferon α-n3) (Interferon Sciences/Fujimoto), interferon-α (Alfa Wassermann/J&J), interferon β1A-IF (Serono/Inhale Therapeutics), Peginterferon α 2b (Enzon/Schering-Plough), Copolymer 1 (Cop-1; COPAXONE; Teva Pharmaceutical Industries, Inc.); hyperbaric oxygen; intravenous immunoglobulin; clabribine; antibodies to or antagonists of other human cytokines or growth factors and their receptors, for example, TNF, LT, IL-1, IL-2, IL-6, IL-7, IL-8, IL-23, IL-15, IL-16, IL-18, EMAP-II, GM-CSF, FGF, and PDGF. Binding proteins of the invention can be combined with antibodies to cell surface molecules such as CD2, CD3, CD4, CD8, CD19, CD20, CD25, CD28, CD30, CD40, CD45, CD69, CD80, CD86, CD90 or their ligands. Binding proteins of the invention, may also be combined with agents, such as methotrexate, cyclosporine, FK506, rapamycin, mycophenolate mofetil, leflunomide, NSAIDs, for example, ibuprofen, corticosteroids such as prednisolone, phosphodiesterase inhibitors, adensosine agonists, antithrombotic agents, complement inhibitors, adrenergic agents, agents which interfere with signalling by proinflammatory cytokines such as TNFα or IL-1 (e.g., IRAK, NIK, IKK, p38 or MAP kinase inhibitors), IL-1β converting enzyme inhibitors, TACE inhibitors, T-cell signaling inhibitors such as kinase inhibitors, metalloproteinase inhibitors, sulfasalazine, azathioprine, 6-mercaptopurines, angiotensin converting enzyme inhibitors, soluble cytokine receptors and derivatives thereof (e.g., soluble p55 or p75 TNF receptors, sIL-1RI, sIL-1RII, sIL-6R), antiinflammatory cytokines (e.g., IL-4, IL-10, IL-13 and TGFβ) and bcl-2 inhibitors.

[0514] Examples of therapeutic agents for multiple sclerosis in which binding proteins of the invention can be combined to include interferon-β, for example, IFNβ1a and IFNβ1b; copaxone, corticosteroids, caspase inhibitors, for example inhibitors of caspase-1, IL-1 inhibitors, TNF inhibitors, and antibodies to CD40 ligand and CD80.

[0515] The binding proteins of the invention, may also be combined with agents, such as alemtuzumab, dronabinol, Unimed, daclizumab, mitoxantrone, xaliproden hydrochloride, fampridine, glatiramer acetate, natalizumab, sinnabidol, a-immunokine NNSO3, ABR-215062, AnergiX.MS, chemokine receptor antagonists, BBR-2778, calagualine, CPI-1189, LEM (liposome encapsulated mitoxantrone), THC.CBD (cannabinoid agonist) MBP-8298, mesopram (PDE4 inhibitor), MNA-715, anti-IL-6 receptor antibody, neurovax, pirfenidone allotrap 1258 (RDP-1258), sTNF-R1, talampanel, teriflunomide, TGF-beta2, tiplimotide, VLA-4 antagonists (for example, TR-14035, VLA4 Ultrahaler, Antegran-ELAN/Biogen), interferon gamma antagonists, IL-4 agonists.

[0516] Non-limiting examples of therapeutic agents for Angina with which binding proteins of the invention can be combined include the following: aspirin, nitroglycerin, isosorbide mononitrate, metoprolol succinate, atenolol, metoprolol tartrate, amlodipine besylate, diltiazem hydrochloride, isosorbide dinitrate, clopidogrel bisulfate, nifedipine, atorvastatin calcium, potassium chloride, furosemide, simvastatin, verapamil hcl, digoxin, propranolol hydrochloride, carvedilol, lisinopril, spironolactone, hydrochlorothiazide, enalapril maleate, nadolol, ramipril, enoxaparin sodium, heparin sodium, valsartan, sotalol hydrochloride, fenofibrate, ezetimibe, bumetanide, losartan potassium, lisinopril/hydrochlorothiazide, felodipine, captopril, bisoprolol fumarate.

[0517] Non-limiting examples of therapeutic agents for Ankylosing Spondylitis with which binding proteins of the invention can be combined include the following: ibuprofen, diclofenac and misoprostol, naproxen, meloxicam, indomethacin, diclofenac, celecoxib, rofecoxib, Sulfasalazine, Methotrexate, azathioprine, minocyclin, prednisone, etanercept, infliximab.

[0518] Non-limiting examples of therapeutic agents for Asthma with which binding proteins of the invention can be combined include the following: albuterol, salmeterol/fluticasone, montelukast sodium, fluticasone propionate, budesonide, prednisone, salmeterol xinafoate, levalbuterol hcl, albuterol sulfate/ipratropium, prednisolone sodium phosphate, triamcinolone acetonide, beclomethasone dipropionate, ipratropium bromide, azithromycin, pirbuterol acetate, prednisolone, theophylline anhydrous, methylprednisolone sodium succinate, clarithromycin, zafirlukast, formoterol fumarate, influenza virus vaccine, methylprednisolone, amoxicillin trihydrate, flunisolide, allergy injection, cromolyn sodium, fexofenadine hydrochloride, flunisolide/menthol, amoxicillin/clavulanate, levofloxacin, inhaler assist device, guaifenesin, dexamethasone sodium phosphate, moxifloxacin hcl, doxycycline hyclate, guaifenesin/d-methorphan, p-ephedrine/cod/chlorphenir, gatifloxacin, cetirizine hydrochloride, mometasone furoate, salmeterol xinafoate, benzonatate, cephalexin, pe/hydrocodone/chlorphenir, cetirizine hcl/pseudoephed, phenylephrine/cod/promethazine, codeine/promethazine, cefprozil, dexamethasone, guaifenesin/pseudoephedrine, chlorpheniramine/hydrocodone, nedocromil sodium, terbutaline sulfate, epinephrine, methylprednisolone, metaproterenol sulfate.

[0519] Non-limiting examples of therapeutic agents for COPD with which binding proteins of the invention can be combined include the following: albuterol sulfate/ipratropium, ipratropium bromide, salmeterol/fluticasone, albuterol, salmeterol xinafoate, fluticasone propionate, prednisone, theophylline anhydrous, methylprednisolone sodium succinate, montelukast sodium, budesonide, formoterol fumarate, triamcinolone acetonide, levofloxacin, guaifenesin, azithromycin, beclomethasone dipropionate, levalbuterol hcl, flunisolide, ceftriaxone sodium, amoxicillin trihydrate, gatifloxacin, zafirlukast, amoxicillin/clavulanate, flunisolide/menthol, chlorpheniramine/hydrocodone, metaproterenol sulfate, methylprednisolone, mometasone furoate, p-ephedrine/cod/chlorphenir, pirbuterol acetate, p-ephedrine/loratadine, terbutaline sulfate, tiotropium bromide, (R,R)-formoterol, TgAAT, Cilomilast, Roflumilast.

[0520] Non-limiting examples of therapeutic agents for HCV with which binding proteins of the invention can be combined include the following: Interferon-alpha-2a, Interferon-alpha-2b, Interferon-alpha con1, Interferon-alpha-n1, Pegylated interferon-alpha-2a, Pegylated interferon-alpha-2b, ribavirin, Peginterferon alfa-2b+ribavirin, Ursodeoxycholic Acid, Glycyrrhizic Acid, Thymalfasin, Maxamine, VX-497 and any compounds that are used to treat HCV through intervention with the following targets: HCV polymerase, HCV protease, HCV helicase, HCV IRES (internal ribosome entry site).

[0521] Non-limiting examples of therapeutic agents for Idiopathic Pulmonary Fibrosis with which binding proteins of the invention can be combined include the following: prednisone, azathioprine, albuterol, colchicine, albuterol sulfate, digoxin, gamma interferon, methylprednisolone sod succ, lorazepam, furosemide, lisinopril, nitroglycerin, spironolactone, cyclophosphamide, ipratropium bromide, actinomycin d, alteplase, fluticasone propionate, levofloxacin, metaproterenol sulfate, morphine sulfate, oxycodone hcl, potassium chloride, triamcinolone acetonide, tacrolimus anhydrous, calcium, interferon-alpha, methotrexate, mycophenolate mofetil, Interferon-gamma-1β.

[0522] Non-limiting examples of therapeutic agents for Myocardial Infarction with which binding proteins of the invention can be combined include the following: aspirin, nitroglycerin, metoprolol tartrate, enoxaparin sodium, heparin sodium, clopidogrel bisulfate, carvedilol, atenolol, morphine sulfate, metoprolol succinate, warfarin sodium, lisinopril, isosorbide mononitrate, digoxin, furosemide, simvastatin, ramipril, tenecteplase, enalapril maleate, torsemide, retavase, losartan potassium, quinapril hcl/mag carb, bumetanide, alteplase, enalaprilat, amiodarone hydrochloride, tirofiban hcl m-hydrate, diltiazem hydrochloride, captopril, irbesartan, valsartan, propranolol hydrochloride, fosinopril sodium, lidocaine hydrochloride, eptifibatide, cefazolin sodium, atropine sulfate, aminocaproic acid, spironolactone, interferon, sotalol hydrochloride, potassium chloride, docusate sodium, dobutamine hcl, alprazolam, pravastatin sodium, atorvastatin calcium, midazolam hydrochloride, meperidine hydrochloride, isosorbide dinitrate, epinephrine, dopamine hydrochloride, bivalirudin, rosuvastatin, ezetimibe/simvastatin, avasimibe, cariporide.

[0523] Non-limiting examples of therapeutic agents for Psoriasis with which binding proteins of the invention can be combined include the following: small molecule inhibitor of KDR, small molecule inhibitor of Tie-2, calcipotriene, clobetasol propionate, triamcinolone acetonide, halobetasol propionate, tazarotene, methotrexate, fluocinonide, betamethasone diprop augmented, fluocinolone acetonide, acitretin, tar shampoo, betamethasone valerate, mometasone furoate, ketoconazole, pramoxine/fluocinolone, hydrocortisone valerate, flurandrenolide, urea, betamethasone, clobetasol propionate/emoll, fluticasone propionate, azithromycin, hydrocortisone, moisturizing formula, folic acid, desonide, pimecrolimus, coal tar, diflorasone diacetate, etanercept folate, lactic acid, methoxsalen, hc/bismuth subgal/znox/resor, methylprednisolone acetate, prednisone, sunscreen, halcinonide, salicylic acid, anthralin, clocortolone pivalate, coal extract, coal tar/salicylic acid, coal tar/salicylic acid/sulfur, desoximetasone, diazepam, emollient, fluocinonide/emollient, mineral oil/castor oil/na lact, mineral oil/peanut oil, petroleum/isopropyl myristate, psoralen, salicylic acid, soap/tribromsalan, thimerosal/boric acid, celecoxib, infliximab, cyclosporine, alefacept, efalizumab, tacrolimus, pimecrolimus, PUVA, UVB, sulfasalazine.

[0524] Non-limiting examples of therapeutic agents for Psoriatic Arthritis with which binding proteins of the invention can be combined include the following: methotrexate, etanercept, rofecoxib, celecoxib, folic acid, sulfasalazine, naproxen, leflunomide, methylprednisolone acetate, indomethacin, hydroxychloroquine sulfate, prednisone, sulindac, betamethasone diprop augmented, infliximab, methotrexate, folate, triamcinolone acetonide, diclofenac, dimethylsulfoxide, piroxicam, diclofenac sodium, ketoprofen, meloxicam, methylprednisolone, nabumetone, tolmetin sodium, calcipotriene, cyclosporine, diclofenac sodium/misoprostol, fluocinonide, glucosamine sulfate, gold sodium thiomalate, hydrocodone bitartrate/apap, ibuprofen, risedronate sodium, sulfadiazine, thioguanine, valdecoxib, alefacept, efalizumab and bcl-2 inhibitors.

[0525] Non-limiting examples of therapeutic agents for Restenosis with which binding proteins of the invention can be combined include the following: sirolimus, paclitaxel, everolimus, tacrolimus, Zotarolimus, acetaminophen.

[0526] Non-limiting examples of therapeutic agents for Sciatica with which binding proteins of the invention can be combined include the following: hydrocodone bitartrate/apap, rofecoxib, cyclobenzaprine hcl, methylprednisolone, naproxen, ibuprofen, oxycodone hcl/acetaminophen, celecoxib, valdecoxib, methylprednisolone acetate, prednisone, codeine phosphate/apap, tramadol hcl/acetaminophen, metaxalone, meloxicam, methocarbamol, lidocaine hydrochloride, diclofenac sodium, gabapentin, dexamethasone, carisoprodol, ketorolac tromethamine, indomethacin, acetaminophen, diazepam, nabumetone, oxycodone hcl, tizanidine hcl, diclofenac sodium/misoprostol, propoxyphene napsylate/apap, asa/oxycod/oxycodone ter, ibuprofen/hydrocodone bit, tramadol hcl, etodolac, propoxyphene hcl, amitriptyline hcl, carisoprodol/codeine phos/asa, morphine sulfate, multivitamins, naproxen sodium, orphenadrine citrate, temazepam.

[0527] Examples of therapeutic agents for SLE (Lupus) in which binding proteins of the invention can be combined include the following: NSAIDS, for example, diclofenac, naproxen, ibuprofen, piroxicam, indomethacin; COX2 inhibitors, for example, Celecoxib, rofecoxib, valdecoxib; anti-malarials, for example, hydroxychloroquine; Steroids, for example, prednisone, prednisolone, budenoside, dexamethasone; Cytotoxics, for example, azathioprine, cyclophosphamide, mycophenolate mofetil, methotrexate; inhibitors of PDE4 or purine synthesis inhibitor, for example Cellcept. Binding proteins of the invention, may also be combined with agents such as sulfasalazine, 5-aminosalicylic acid, olsalazine, Imuran and agents which interfere with synthesis, production or action of proinflammatory cytokines such as IL-1, for example, caspase inhibitors like IL-1β converting enzyme inhibitors and IL-1ra. Binding proteins of the invention may also be used with T cell signaling inhibitors, for example, tyrosine kinase inhibitors; or molecules that target T cell activation molecules, for example, CTLA-4-IgG or anti-B7 family antibodies, anti-PD-1 family antibodies. Binding proteins of the invention, can be combined with IL-11 or anti-cytokine antibodies, for example, fonotolizumab (anti-IFNg antibody), or anti-receptor receptor antibodies, for example, anti-IL-6 receptor antibody and antibodies to B-cell surface molecules. Antibodies of the invention or antigen binding portion thereof may also be used with LJP 394 (abetimus), agents that deplete or inactivate B-cells, for example, Rituximab (anti-CD20 antibody), lymphostat-B (anti-BlyS antibody), TNF antagonists, for example, anti-TNF antibodies, Adalimumab (PCT Publication No. WO 97/29131; HUMIRA), CA2 (REMICADE), CDP 571, TNFR-Ig constructs, (p75TNFRIgG (ENBREL) and p55TNFRIgG (LENERCEPT)) and bcl-2 inhibitors, because bcl-2 overexpression in transgenic mice has been demonstrated to cause a lupus like phenotype (see Marquina, Regina et al., Journal of Immunology (2004), 172(11), 7177-7185), therefore inhibition is expected to have therapeutic effects.

[0528] The pharmaceutical compositions of the invention may include a “therapeutically effective amount” or a “prophylactically effective amount” of a binding protein of the invention. A “therapeutically effective amount” refers to an amount effective, at dosages and for periods of time necessary, to achieve the desired therapeutic result. A therapeutically effective amount of the binding protein may be determined by a person skilled in the art and may vary according to factors such as the disease state, age, sex, and weight of the individual, and the ability of the binding protein to elicit a desired response in the individual. A therapeutically effective amount is also one in which any toxic or detrimental effects of the antibody, or antibody portion, are outweighed by the therapeutically beneficial effects. A “prophylactically effective amount” refers to an amount effective, at dosages and for periods of time necessary, to achieve the desired prophylactic result. Typically, since a prophylactic dose is used in subjects prior to or at an earlier stage of disease, the prophylactically effective amount will be less than the therapeutically effective amount.

[0529] Dosage regimens may be adjusted to provide the optimum desired response (e.g., a therapeutic or prophylactic response). For example, a single bolus may be administered, several divided doses may be administered over time or the dose may be proportionally reduced or increased as indicated by the exigencies of the therapeutic situation. It is especially advantageous to formulate parenteral compositions in dosage unit form for ease of administration and uniformity of dosage. Dosage unit form as used herein refers to physically discrete units suited as unitary dosages for the mammalian subjects to be treated; each unit containing a predetermined quantity of active compound calculated to produce the desired therapeutic effect in association with the required pharmaceutical carrier. The specification for the dosage unit forms of the invention are dictated by and directly dependent on (a) the unique characteristics of the active compound and the particular therapeutic or prophylactic effect to be achieved, and (b) the limitations inherent in the art of compounding such an active compound for the treatment of sensitivity in individuals.

[0530] An exemplary, non-limiting range for a therapeutically or prophylactically effective amount of a binding protein of the invention is 0.1-20 mg/kg, for example, 1-10 mg/kg. It is to be noted that dosage values may vary with the type and severity of the condition to be alleviated. It is to be further understood that for any particular subject, specific dosage regimens should be adjusted over time according to the individual need and the professional judgment of the person administering or supervising the administration of the compositions, and that dosage ranges set forth herein are exemplary only and are not intended to limit the scope or practice of the claimed composition.

[0531] It will be readily apparent to those skilled in the art that other suitable modifications and adaptations of the methods of the invention described herein are obvious and may be made using suitable equivalents without departing from the scope of the invention or the embodiments disclosed herein. Having now described the present invention in detail, the same will be more clearly understood by reference to the following examples, which are included for purposes of illustration only and are not intended to be limiting of the invention.

### V. Diagnostics

[0532] The disclosure herein also provides diagnostic applications. This is further elucidated below.

### I. Method of Assay

[0533] The present disclosure also provides a method for determining the presence, amount or concentration of an analyte (or a fragment thereof) in a test sample using at least one DVD-Ig as described herein. Any suitable assay as is known in the art can be used in the method. Examples include, but are not limited to, immunoassay, such as sandwich immunoassay (e.g., monoclonal, polyclonal and/or DVD-Ig sandwich immunoassays or any variation thereof (e.g., monoclonal/DVD-Ig, DVD-Ig/polyclonal, etc.), including radioisotope detection (radioimmunoassay (RIA)) and enzyme detection (enzyme immunoassay (EIA) or enzyme-linked immunosorbent assay (ELISA) (e.g., Quantikine ELISA assays, R&D Systems, Minneapolis, Minn.))), competitive inhibition immunoassay (e.g., forward and reverse), fluorescence polarization immunoassay (FPIA), enzyme multiplied immunoassay technique (EMIT), bioluminescence resonance energy transfer (BRET), and homogeneous chemiluminescent assay, etc. In a SELDI-based immunoassay, a capture reagent that specifically binds an analyte (or a fragment thereof) of interest is attached to the surface of a mass spectrometry probe, such as a pre-activated protein chip array. The analyte (or a fragment thereof) is then specifically captured on the biochip, and the captured analyte (or a fragment thereof) is detected by mass spectrometry. Alternatively, the analyte (or a fragment thereof) can be eluted from the capture reagent and detected by traditional MALDI (matrix-assisted laser desorption/ionization) or by SELDI. A chemiluminescent microparticle immunoassay, in particular one employing the ARCHITECT® automated analyzer (Abbott Laboratories, Abbott Park, Ill.), is an example of a preferred immunoassay.

[0534] Methods well-known in the art for collecting, handling and processing urine, blood, serum and plasma, and other body fluids, are used in the practice of the present disclosure, for instance, when a DVD-Ig as described herein is employed as an immunodiagnostic reagent and/or in an analyte immunoassay kit. The test sample can comprise further moieties in addition to the analyte of interest, such as antibodies, antigens, haptens, hormones, drugs, enzymes, receptors, proteins, peptides, polypeptides, oligonucleotides and/or polynucleotides. For example, the sample can be a whole blood sample obtained from a subject. It can be necessary or desired that a test sample, particularly whole blood, be treated prior to immunoassay as described herein, e.g., with a pretreatment reagent. Even in cases where pretreatment is not necessary (e.g., most urine samples), pretreatment optionally can be done (e.g., as part of a regimen on a commercial platform).

[0535] The pretreatment reagent can be any reagent appropriate for use with the immunoassay and kits of the invention. The pretreatment optionally comprises: (a) one or more solvents (e.g., methanol and ethylene glycol) and optionally, salt, (b) one or more solvents and salt, and optionally, detergent, (c) detergent, or (d) detergent and salt. Pretreatment reagents are known in the art, and such pretreatment can be employed, e.g., as used for assays on Abbott TDx, AxSYM®, and ARCHITECT® analyzers (Abbott Laboratories, Abbott Park, Ill.), as described in the literature (see, e.g., Yatscoff et al., Abbott TDx Monoclonal Antibody Assay Evaluated for Measuring Cyclosporine in Whole Blood, Clin. Chem. 36: 1969-1973 (1990), and Wallemacq et al., Evaluation of the New AxSYM Cyclosporine Assay: Comparison with TDx Monoclonal Whole Blood and EMIT Cyclosporine Assays, Clin. Chem. 45: 432-435 (1999)), and/or as commercially available. Additionally, pretreatment can be done as described in Abbott's U.S. Pat. No. 5,135,875, European Pat. Pub. No. 0 471 293, U.S. Provisional Pat. App. 60/878,017, filed Dec. 29, 2006, and U.S. Pat. App. Pub. No. 2008/0020401 (incorporated by reference in its entirety for its teachings regarding pretreatment). The pretreatment reagent can be a heterogeneous agent or a homogeneous agent.

[0536] With use of a heterogeneous pretreatment reagent, the pretreatment reagent precipitates analyte binding protein (e.g., protein that can bind to an analyte or a fragment thereof) present in the sample. Such a pretreatment step comprises removing any analyte binding protein by separating from the precipitated analyte binding protein the supernatant of the mixture formed by addition of the pretreatment agent to sample. In such an assay, the supernatant of the mixture absent any binding protein is used in the assay, proceeding directly to the antibody capture step.

[0537] With use of a homogeneous pretreatment reagent there is no such separation step. The entire mixture of test sample and pretreatment reagent are contacted with a labeled specific binding partner for analyte (or a fragment thereof), such as a labeled anti-analyte antibody (or an antigenically reactive fragment thereof). The pretreatment reagent employed for such an assay typically is diluted in the pretreated test sample mixture, either before or during capture by the first specific binding partner. Despite such dilution, a certain amount of the pretreatment reagent is still present (or remains) in the test sample mixture during capture. According to the invention, the labeled specific binding partner can be a DVD-Ig (or a fragment, a variant, or a fragment of a variant thereof).

[0538] In a heterogeneous format, after the test sample is obtained from a subject, a first mixture is prepared. The mixture contains the test sample being assessed for an analyte (or a fragment thereof) and a first specific binding partner, wherein the first specific binding partner and any analyte contained in the test sample form a first specific binding partner-analyte complex. Preferably, the first specific binding partner is an anti-analyte antibody or a fragment thereof. The first specific binding partner can be a DVD-Ig (or a fragment, a variant, or a fragment of a variant thereof) as described herein. The order in which the test sample and the first specific binding partner are added to form the mixture is not critical. Preferably, the first specific binding partner is immobilized on a solid phase. The solid phase used in the immunoassay (for the first specific binding partner and, optionally, the second specific binding partner) can be any solid phase known in the art, such as, but not limited to, a magnetic particle, a bead, a test tube, a microtiter plate, a cuvette, a membrane, a scaffolding molecule, a film, a filter paper, a disc and a chip.

[0539] After the mixture containing the first specific binding partner-analyte complex is formed, any unbound analyte is removed from the complex using any technique known in the art. For example, the unbound analyte can be removed by washing. Desirably, however, the first specific binding partner is present in excess of any analyte present in the test sample, such that all analyte that is present in the test sample is bound by the first specific binding partner.

[0540] After any unbound analyte is removed, a second specific binding partner is added to the mixture to form a first specific binding partner-analyte-second specific binding partner complex. The second specific binding partner is preferably an anti-analyte antibody that binds to an epitope on analyte that differs from the epitope on analyte bound by the first specific binding partner. Moreover, also preferably, the second specific binding partner is labeled with or contains a detectable label as described above. The second specific binding partner can be a DVD-Ig (or a fragment, a variant, or a fragment of a variant thereof) as described herein.

[0541] Any suitable detectable label as is known in the art can be used. For example, the detectable label can be a radioactive label (such as ³H, ¹²⁵I, ³⁵S, ¹⁴C, ³²P, and ³³P), an enzymatic label (such as horseradish peroxidase, alkaline peroxidase, glucose 6-phosphate dehydrogenase, and the like), a chemiluminescent label (such as acridinium esters, thioesters, or sulfonamides; luminol, isoluminol, phenanthridinium esters, and the like), a fluorescent label (such as fluorescein (e.g., 5-fluorescein, 6-carboxyfluorescein, 3′6-carboxyfluorescein, 5(6)-carboxyfluorescein, 6-hexachloro-fluorescein, 6-tetrachlorofluorescein, fluorescein isothiocyanate, and the like)), rhodamine, phycobiliproteins, R-phycoerythrin, quantum dots (e.g., zinc sulfide-capped cadmium selenide), a thermometric label, or an immuno-polymerase chain reaction label. An introduction to labels, labeling procedures and detection of labels is found in Polak and Van Noorden, Introduction to Immunocytochemistry, 2^{nd} ed., Springer Verlag, N.Y. (1997), and in Haugland, Handbook of Fluorescent Probes and Research Chemicals (1996), which is a combined handbook and catalogue published by Molecular Probes, Inc., Eugene, Oreg. A fluorescent label can be used in FPIA (see, e.g., U.S. Pat. Nos. 5,593,896, 5,573,904, 5,496,925, 5,359,093, and 5,352,803, which are hereby incorporated by reference in their entireties). An acridinium compound can be used as a detectable label in a homogeneous or heterogeneous chemiluminescent assay (see, e.g., Adamczyk et al., Bioorg. Med. Chem. Lett. 16: 1324-1328 (2006); Adamczyk et al., Bioorg. Med. Chem. Lett. 4: 2313-2317 (2004); Adamczyk et al., Biorg. Med. Chem. Lett. 14: 3917-3921 (2004); and Adamczyk et al., Org. Lett. 5: 3779-3782 (2003)).

[0542] A preferred acridinium compound is an acridinium-9-carboxamide. Methods for preparing acridinium 9-carboxamides are described in Mattingly, J. Biolumin. Chemilumin. 6: 107-114 (1991); Adamczyk et al., J. Org. Chem. 63: 5636-5639 (1998); Adamczyk et al., Tetrahedron 55: 10899-10914 (1999); Adamczyk et al., Org. Lett. 1: 779-781 (1999); Adamczyk et al., Bioconjugate Chem. 11: 714-724 (2000); Mattingly et al., In Luminescence Biotechnology: Instruments and Applications; Dyke, K. V. Ed.; CRC Press: Boca Raton, pp. 77-105 (2002); Adamczyk et al., Org. Lett. 5: 3779-3782 (2003); and U.S. Pat. Nos. 5,468,646, 5,543,524 and 5,783,699 (each of which is incorporated herein by reference in its entirety for its teachings regarding same). Another preferred acridinium compound is an acridinium-9-carboxylate aryl ester. An example of an acridinium-9-carboxylate aryl ester is 10-methyl-9-(phenoxycarbonyl)acridinium fluorosulfonate (available from Cayman Chemical, Ann Arbor, Mich.). Methods for preparing acridinium 9-carboxylate aryl esters are described in McCapra et al., Photochem. Photobiol. 4: 1111-21 (1965); Razavi et al., Luminescence 15: 245-249 (2000); Razavi et al., Luminescence 15: 239-244 (2000); and U.S. Pat. No. 5,241,070 (each of which is incorporated herein by reference in its entirety for its teachings regarding same). Further details regarding acridinium-9-carboxylate aryl ester and its use are set forth in US 2008-0248493.

[0543] Chemiluminescent assays (e.g., using acridinium as described above or other chemiluminescent agents) can be performed in accordance with the methods described in Adamczyk et al., Anal. Chim. Acta 579(1): 61-67 (2006). While any suitable assay format can be used, a microplate chemiluminometer (Mithras LB-940, Berthold Technologies U.S.A., LLC, Oak Ridge, Tenn.) enables the assay of multiple samples of small volumes rapidly.

[0544] The order in which the test sample and the specific binding partner(s) are added to form the mixture for chemiluminescent assay is not critical. If the first specific binding partner is detectably labeled with a chemiluminescent agent such as an acridinium compound, detectably labeled first specific binding partner-analyte complexes form. Alternatively, if a second specific binding partner is used and the second specific binding partner is detectably labeled with a chemiluminescent agent such as an acridinium compound, detectably labeled first specific binding partner-analyte-second specific binding partner complexes form. Any unbound specific binding partner, whether labeled or unlabeled, can be removed from the mixture using any technique known in the art, such as washing.

[0545] Hydrogen peroxide can be generated in situ in the mixture or provided or supplied to the mixture (e.g., the source of the hydrogen peroxide being one or more buffers or other solutions that are known to contain hydrogen peroxide) before, simultaneously with, or after the addition of an above-described acridinium compound. Hydrogen peroxide can be generated in situ in a number of ways such as would be apparent to one skilled in the art.

[0546] Upon the simultaneous or subsequent addition of at least one basic solution to the sample, a detectable signal, namely, a chemiluminescent signal, indicative of the presence of analyte is generated. The basic solution contains at least one base and has a pH greater than or equal to 10, preferably, greater than or equal to 12. Examples of basic solutions include, but are not limited to, sodium hydroxide, potassium hydroxide, calcium hydroxide, ammonium hydroxide, magnesium hydroxide, sodium carbonate, sodium bicarbonate, calcium hydroxide, calcium carbonate, and calcium bicarbonate. The amount of basic solution added to the sample depends on the concentration of the basic solution. Based on the concentration of the basic solution used, one skilled in the art can easily determine the amount of basic solution to add to the sample.

[0547] The chemiluminescent signal that is generated can be detected using routine techniques known to those skilled in the art. Based on the intensity of the signal generated, the amount of analyte in the sample can be quantified. Specifically, the amount of analyte in the sample is proportional to the intensity of the signal generated. The amount of analyte present can be quantified by comparing the amount of light generated to a standard curve for analyte or by comparison to a reference standard. The standard curve can be generated using serial dilutions or solutions of known concentrations of analyte by mass spectroscopy, gravimetric methods, and other techniques known in the art. While the above is described with emphasis on use of an acridinium compound as the chemiluminescent agent, one of ordinary skill in the art can readily adapt this description for use of other chemiluminescent agents.

[0548] Analyte immunoassays generally can be conducted using any format known in the art, such as, but not limited to, a sandwich format. Specifically, in one immunoassay format, at least two antibodies are employed to separate and quantify analyte, such as human analyte, or a fragment thereof in a sample. More specifically, the at least two antibodies bind to different epitopes on an analyte (or a fragment thereof) forming an immune complex, which is referred to as a “sandwich.” Generally, in the immunoassays one or more antibodies can be used to capture the analyte (or a fragment thereof) in the test sample (these antibodies are frequently referred to as a “capture” antibody or “capture” antibodies) and one or more antibodies can be used to bind a detectable (namely, quantifiable) label to the sandwich (these antibodies are frequently referred to as the “detection antibody,” the “detection antibodies,” the “conjugate,” or the “conjugates”). Thus, in the context of a sandwich immunoassay format, a DVD-Ig (or a fragment, a variant, or a fragment of a variant thereof) as described herein can be used as a capture antibody, a detection antibody, or both. For example, one DVD-Ig having a domain that can bind a first epitope on an analyte (or a fragment thereof) can be used as a capture antibody and/or another DVD-Ig having a domain that can bind a second epitope on an analyte (or a fragment thereof) can be used as a detection antibody. In this regard, a DVD-Ig having a first domain that can bind a first epitope on an analyte (or a fragment thereof) and a second domain that can bind a second epitope on an analyte (or a fragment thereof) can be used as a capture antibody and/or a detection antibody. Alternatively, one DVD-Ig having a first domain that can bind an epitope on a first analyte (or a fragment thereof) and a second domain that can bind an epitope on a second analyte (or a fragment thereof) can be used as a capture antibody and/or a detection antibody to detect, and optionally quantify, two or more analytes. In the event that an analyte can be present in a sample in more than one form, such as a monomeric form and a dimeric/multimeric form, which can be homomeric or heteromeric, one DVD-Ig having a domain that can bind an epitope that is only exposed on the monomeric form and another DVD-Ig having a domain that can bind an epitope on a different part of a dimeric/multimeric form can be used as capture antibodies and/or detection antibodies, thereby enabling the detection, and optional quantification, of different forms of a given analyte. Furthermore, employing DVD-Igs with differential affinities within a single DVD-Ig and/or between DVD-Igs can provide an avidity advantage. In the context of immunoassays as described herein, it generally may be helpful or desired to incorporate one or more linkers within the structure of a DVD-Ig. When present, optimally the linker should be of sufficient length and structural flexibility to enable binding of an epitope by the inner domains as well as binding of another epitope by the outer domains. In this regard, if a DVD-Ig can bind two different analytes and one analyte is larger than the other, desirably the larger analyte is bound by the outer domains.

[0549] Generally speaking, a sample being tested for (for example, suspected of containing) analyte (or a fragment thereof) can be contacted with at least one capture antibody (or antibodies) and at least one detection antibody (which can be a second detection antibody or a third detection antibody or even a successively numbered antibody, e.g., as where the capture and/or detection antibody comprise multiple antibodies) either simultaneously or sequentially and in any order. For example, the test sample can be first contacted with at least one capture antibody and then (sequentially) with at least one detection antibody. Alternatively, the test sample can be first contacted with at least one detection antibody and then (sequentially) with at least one capture antibody. In yet another alternative, the test sample can be contacted simultaneously with a capture antibody and a detection antibody.

[0550] In the sandwich assay format, a sample suspected of containing analyte (or a fragment thereof) is first brought into contact with at least one first capture antibody under conditions that allow the formation of a first antibody/analyte complex. If more than one capture antibody is used, a first capture antibody/analyte complex comprising two or more capture antibodies is formed. In a sandwich assay, the antibodies, i.e., preferably, the at least one capture antibody, are used in molar excess amounts of the maximum amount of analyte (or a fragment thereof) expected in the test sample. For example, from about 5 μg to about 1 mg of antibody per mL of buffer (e.g., microparticle coating buffer) can be used.

[0551] Competitive inhibition immunoassays, which are often used to measure small analytes because binding by only one antibody is required, comprise sequential and classic formats. In a sequential competitive inhibition immunoassay a capture antibody to an analyte of interest is coated onto a well of a microtiter plate or other solid support. When the sample containing the analyte of interest is added to the well, the analyte of interest binds to the capture antibody. After washing, a known amount of labeled (e.g., biotin or horseradish peroxidase (HRP)) analyte is added to the well. A substrate for an enzymatic label is necessary to generate a signal. An example of a suitable substrate for HRP is 3,3′,5,5′-tetramethylbenzidine (TMB). After washing, the signal generated by the labeled analyte is measured and is inversely proportional to the amount of analyte in the sample. In a classic competitive inhibition immunoassay an antibody to an analyte of interest is coated onto a solid support (e.g., a well of a microtiter plate). However, unlike the sequential competitive inhibition immunoassay, the sample and the labeled analyte are added to the well at the same time. Any analyte in the sample competes with labeled analyte for binding to the capture antibody. After washing, the signal generated by the labeled analyte is measured and is inversely proportional to the amount of analyte in the sample.

[0552] Optionally, prior to contacting the test sample with the at least one capture antibody (for example, the first capture antibody), the at least one capture antibody can be bound to a solid support, which facilitates the separation of the first antibody/analyte (or a fragment thereof) complex from the test sample. The substrate to which the capture antibody is bound can be any suitable solid support or solid phase that facilitates separation of the capture antibody-analyte complex from the sample.

[0553] Examples include a well of a plate, such as a microtiter plate, a test tube, a porous gel (e.g., silica gel, agarose, dextran, or gelatin), a polymeric film (e.g., polyacrylamide), beads (e.g., polystyrene beads or magnetic beads), a strip of a filter/membrane (e.g., nitrocellulose or nylon), microparticles (e.g., latex particles, magnetizable microparticles (e.g., microparticles having ferric oxide or chromium oxide cores and homo- or hetero-polymeric coats and radii of about 1-10 microns). The substrate can comprise a suitable porous material with a suitable surface affinity to bind antigens and sufficient porosity to allow access by detection antibodies. A microporous material is generally preferred, although a gelatinous material in a hydrated state can be used. Such porous substrates are preferably in the form of sheets having a thickness of about 0.01 to about 0.5 mm, preferably about 0.1 mm. While the pore size may vary quite a bit, preferably the pore size is from about 0.025 to about 15 microns, more preferably from about 0.15 to about 15 microns. The surface of such substrates can be activated by chemical processes that cause covalent linkage of an antibody to the substrate. Irreversible binding, generally by adsorption through hydrophobic forces, of the antigen or the antibody to the substrate results; alternatively, a chemical coupling agent or other means can be used to bind covalently the antibody to the substrate, provided that such binding does not interfere with the ability of the antibody to bind to analyte. Alternatively, the antibody can be bound with microparticles, which have been previously coated with streptavidin (e.g., DYNAL® Magnetic Beads, Invitrogen, Carlsbad, Calif.) or biotin (e.g., using Power-Bind™-SA-MP streptavidin-coated microparticles (Seradyn, Indianapolis, Ind.)) or anti-species-specific monoclonal antibodies. If necessary, the substrate can be derivatized to allow reactivity with various functional groups on the antibody. Such derivatization requires the use of certain coupling agents, examples of which include, but are not limited to, maleic anhydride, N-hydroxysuccinimide, and 1-ethyl-3-(3-dimethylaminopropyl) carbodiimide. If desired, one or more capture reagents, such as antibodies (or fragments thereof), each of which is specific for analyte(s) can be attached to solid phases in different physical or addressable locations (e.g., such as in a biochip configuration (see, e.g., U.S. Pat. No. 6,225,047; Int'l Pat. App. Pub. No. WO 99/51773; U.S. Pat. No. 6,329,209; Int'l Pat. App. Pub. No. WO 00/56934, and U.S. Pat. No. 5,242,828). If the capture reagent is attached to a mass spectrometry probe as the solid support, the amount of analyte bound to the probe can be detected by laser desorption ionization mass spectrometry. Alternatively, a single column can be packed with different beads, which are derivatized with the one or more capture reagents, thereby capturing the analyte in a single place (see, antibody-derivatized, bead-based technologies, e.g., the xMAP technology of Luminex (Austin, Tex.)).

[0554] After the test sample being assayed for analyte (or a fragment thereof) is brought into contact with the at least one capture antibody (for example, the first capture antibody), the mixture is incubated in order to allow for the formation of a first antibody (or multiple antibody)-analyte (or a fragment thereof) complex. The incubation can be carried out at a pH of from about 4.5 to about 10.0, at a temperature of from about 2° C. to about 45° C., and for a period from at least about one (1) minute to about eighteen (18) hours, preferably from about 1 to about 24 minutes, most preferably for about 4 to about 18 minutes. The immunoassay described herein can be conducted in one step (meaning the test sample, at least one capture antibody and at least one detection antibody are all added sequentially or simultaneously to a reaction vessel) or in more than one step, such as two steps, three steps, etc.

[0555] After formation of the (first or multiple) capture antibody/analyte (or a fragment thereof) complex, the complex is then contacted with at least one detection antibody under conditions which allow for the formation of a (first or multiple) capture antibody/analyte (or a fragment thereof)/second detection antibody complex). While captioned for clarity as the “second” antibody (e.g., second detection antibody), in fact, where multiple antibodies are used for capture and/or detection, the at least one detection antibody can be the second, third, fourth, etc. antibodies used in the immunoassay. If the capture antibody/analyte (or a fragment thereof) complex is contacted with more than one detection antibody, then a (first or multiple) capture antibody/analyte (or a fragment thereof)/(multiple) detection antibody complex is formed. As with the capture antibody (e.g., the first capture antibody), when the at least one (e.g., second and any subsequent) detection antibody is brought into contact with the capture antibody/analyte (or a fragment thereof) complex, a period of incubation under conditions similar to those described above is required for the formation of the (first or multiple) capture antibody/analyte (or a fragment thereof)/(second or multiple) detection antibody complex. Preferably, at least one detection antibody contains a detectable label. The detectable label can be bound to the at least one detection antibody (e.g., the second detection antibody) prior to, simultaneously with, or after the formation of the (first or multiple) capture antibody/analyte (or a fragment thereof)/(second or multiple) detection antibody complex. Any detectable label known in the art can be used (see discussion above, including of the Polak and Van Noorden (1997) and Haugland (1996) references).

[0556] The detectable label can be bound to the antibodies either directly or through a coupling agent. An example of a coupling agent that can be used is EDAC (1-ethyl-3-(3-dimethylaminopropyl) carbodiimide, hydrochloride), which is commercially available from Sigma-Aldrich, St. Louis, Mo. Other coupling agents that can be used are known in the art. Methods for binding a detectable label to an antibody are known in the art. Additionally, many detectable labels can be purchased or synthesized that already contain end groups that facilitate the coupling of the detectable label to the antibody, such as CPSP-Acridinium Ester (i.e., 9-[N-tosyl-N-(3-carboxypropyl)]-10-(3-sulfopropyl)acridinium carboxamide) or SPSP-Acridinium Ester (i.e., N10-(3-sulfopropyl)-N-(3-sulfopropyl)-acridinium-9-carboxamide).

[0557] The (first or multiple) capture antibody/analyte/(second or multiple) detection antibody complex can be, but does not have to be, separated from the remainder of the test sample prior to quantification of the label. For example, if the at least one capture antibody (e.g., the first capture antibody) is bound to a solid support, such as a well or a bead, separation can be accomplished by removing the fluid (of the test sample) from contact with the solid support. Alternatively, if the at least first capture antibody is bound to a solid support, it can be simultaneously contacted with the analyte-containing sample and the at least one second detection antibody to form a first (multiple) antibody/analyte/second (multiple) antibody complex, followed by removal of the fluid (test sample) from contact with the solid support. If the at least one first capture antibody is not bound to a solid support, then the (first or multiple) capture antibody/analyte/(second or multiple) detection antibody complex does not have to be removed from the test sample for quantification of the amount of the label.

[0558] After formation of the labeled capture antibody/analyte/detection antibody complex (e.g., the first capture antibody/analyte/second detection antibody complex), the amount of label in the complex is quantified using techniques known in the art. For example, if an enzymatic label is used, the labeled complex is reacted with a substrate for the label that gives a quantifiable reaction such as the development of color. If the label is a radioactive label, the label is quantified using appropriate means, such as a scintillation counter. If the label is a fluorescent label, the label is quantified by stimulating the label with a light of one color (which is known as the “excitation wavelength”) and detecting another color (which is known as the “emission wavelength”) that is emitted by the label in response to the stimulation. If the label is a chemiluminescent label, the label is quantified by detecting the light emitted either visually or by using luminometers, x-ray film, high speed photographic film, a CCD camera, etc. Once the amount of the label in the complex has been quantified, the concentration of analyte or a fragment thereof in the test sample is determined by appropriate means, such as by use of a standard curve that has been generated using serial dilutions of analyte or a fragment thereof of known concentration. Other than using serial dilutions of analyte or a fragment thereof, the standard curve can be generated gravimetrically, by mass spectroscopy and by other techniques known in the art.

[0559] In a chemiluminescent microparticle assay employing the ARCHITECT® analyzer, the conjugate diluent pH should be about 6.0+/−0.2, the microparticle coating buffer should be maintained at about room temperature (i.e., at from about 17 to about 27° C.), the microparticle coating buffer pH should be about 6.5+/−0.2, and the microparticle diluent pH should be about 7.8+/−0.2. Solids preferably are less than about 0.2%, such as less than about 0.15%, less than about 0.14%, less than about 0.13%, less than about 0.12%, or less than about 0.11%, such as about 0.10%.

[0560] FPIAs are based on competitive binding immunoassay principles. A fluorescently labeled compound, when excited by a linearly polarized light, will emit fluorescence having a degree of polarization inversely proportional to its rate of rotation. When a fluorescently labeled tracer-antibody complex is excited by a linearly polarized light, the emitted light remains highly polarized because the fluorophore is constrained from rotating between the time light is absorbed and the time light is emitted. When a “free” tracer compound (i.e., a compound that is not bound to an antibody) is excited by linearly polarized light, its rotation is much faster than the corresponding tracer-antibody conjugate produced in a competitive binding immunoassay. FPIAs are advantageous over RIAs inasmuch as there are no radioactive substances requiring special handling and disposal. In addition, FPIAs are homogeneous assays that can be easily and rapidly performed.

[0561] In view of the above, a method of determining the presence, amount, or concentration of analyte (or a fragment thereof) in a test sample is provided. The method comprises assaying the test sample for an analyte (or a fragment thereof) by an assay (i) employing (i′) at least one of an antibody, a fragment of an antibody that can bind to an analyte, a variant of an antibody that can bind to an analyte, a fragment of a variant of an antibody that can bind to an analyte, and a DVD-Ig (or a fragment, a variant, or a fragment of a variant thereof) that can bind to an analyte, and (ii′) at least one detectable label and (ii) comprising comparing a signal generated by the detectable label as a direct or indirect indication of the presence, amount or concentration of analyte (or a fragment thereof) in the test sample to a signal generated as a direct or indirect indication of the presence, amount or concentration of analyte (or a fragment thereof) in a control or calibrator. The calibrator is optionally part of a series of calibrators, in which each of the calibrators differs from the other calibrators by the concentration of analyte.

[0562] The method can comprise (i) contacting the test sample with at least one first specific binding partner for analyte (or a fragment thereof) selected from the group consisting of an antibody, a fragment of an antibody that can bind to an analyte, a variant of an antibody that can bind to an analyte, a fragment of a variant of an antibody that can bind to an analyte, and a DVD-Ig (or a fragment, a variant, or a fragment of a variant thereof) that can bind to an analyte so as to form a first specific binding partner/analyte (or fragment thereof) complex, (ii) contacting the first specific binding partner/analyte (or fragment thereof) complex with at least one second specific binding partner for analyte (or fragment thereof) selected from the group consisting of a detectably labeled anti-analyte antibody, a detectably labeled fragment of an anti-analyte antibody that can bind to analyte, a detectably labeled variant of an anti-analyte antibody that can bind to analyte, a detectably labeled fragment of a variant of an anti-analyte antibody that can bind to analyte, and a detectably labeled DVD-Ig (or a fragment, a variant, or a fragment of a variant thereof) so as to form a first specific binding partner/analyte (or fragment thereof)/second specific binding partner complex, and (iii) determining the presence, amount or concentration of analyte in the test sample by detecting or measuring the signal generated by the detectable label in the first specific binding partner/analyte (or fragment thereof)/second specific binding partner complex formed in (ii). A method in which at least one first specific binding partner for analyte (or a fragment thereof) and/or at least one second specific binding partner for analyte (or a fragment thereof) is a DVD-Ig (or a fragment, a variant, or a fragment of a variant thereof) as described herein can be preferred.

[0563] Alternatively, the method can comprise contacting the test sample with at least one first specific binding partner for analyte (or a fragment thereof) selected from the group consisting of an antibody, a fragment of an antibody that can bind to an analyte, a variant of an antibody that can bind to an analyte, a fragment of a variant of an antibody that can bind to an analyte, and a DVD-Ig (or a fragment, a variant, or a fragment of a variant thereof) and simultaneously or sequentially, in either order, contacting the test sample with at least one second specific binding partner, which can compete with analyte (or a fragment thereof) for binding to the at least one first specific binding partner and which is selected from the group consisting of a detectably labeled analyte, a detectably labeled fragment of analyte that can bind to the first specific binding partner, a detectably labeled variant of analyte that can bind to the first specific binding partner, and a detectably labeled fragment of a variant of analyte that can bind to the first specific binding partner. Any analyte (or a fragment thereof) present in the test sample and the at least one second specific binding partner compete with each other to form a first specific binding partner/analyte (or fragment thereof) complex and a first specific binding partner/second specific binding partner complex, respectively. The method further comprises determining the presence, amount or concentration of analyte in the test sample by detecting or measuring the signal generated by the detectable label in the first specific binding partner/second specific binding partner complex formed in (ii), wherein the signal generated by the detectable label in the first specific binding partner/second specific binding partner complex is inversely proportional to the amount or concentration of analyte in the test sample.

[0564] The above methods can further comprise diagnosing, prognosticating, or assessing the efficacy of a therapeutic/prophylactic treatment of a patient from whom the test sample was obtained. If the method further comprises assessing the efficacy of a therapeutic/prophylactic treatment of the patient from whom the test sample was obtained, the method optionally further comprises modifying the therapeutic/prophylactic treatment of the patient as needed to improve efficacy. The method can be adapted for use in an automated system or a semi-automated system.

[0565] With regard to the methods of assay (and kit therefor), it may be possible to employ commercially available anti-analyte antibodies or methods for production of anti-analyte as described in the literature. Commercial supplies of various antibodies include, but are not limited to, Santa Cruz Biotechnology Inc. (Santa Cruz, Calif.), GenWay Biotech, Inc. (San Diego, Calif.), and R&D Systems (RDS; Minneapolis, Minn.).

[0566] Generally, a predetermined level can be employed as a benchmark against which to assess results obtained upon assaying a test sample for analyte or a fragment thereof, e.g., for detecting disease or risk of disease. Generally, in making such a comparison, the predetermined level is obtained by running a particular assay a sufficient number of times and under appropriate conditions such that a linkage or association of analyte presence, amount or concentration with a particular stage or endpoint of a disease, disorder or condition or with particular clinical indicia can be made. Typically, the predetermined level is obtained with assays of reference subjects (or populations of subjects). The analyte measured can include fragments thereof, degradation products thereof, and/or enzymatic cleavage products thereof.

[0567] In particular, with respect to a predetermined level as employed for monitoring disease progression and/or treatment, the amount or concentration of analyte or a fragment thereof may be “unchanged,” “favorable” (or “favorably altered”), or “unfavorable” (or “unfavorably altered”). “Elevated” or “increased” refers to an amount or a concentration in a test sample that is higher than a typical or normal level or range (e.g., predetermined level), or is higher than another reference level or range (e.g., earlier or baseline sample). The term “lowered” or “reduced” refers to an amount or a concentration in a test sample that is lower than a typical or normal level or range (e.g., predetermined level), or is lower than another reference level or range (e.g., earlier or baseline sample). The term “altered” refers to an amount or a concentration in a sample that is altered (increased or decreased) over a typical or normal level or range (e.g., predetermined level), or over another reference level or range (e.g., earlier or baseline sample).

[0568] The typical or normal level or range for analyte is defined in accordance with standard practice. Because the levels of analyte in some instances will be very low, a so-called altered level or alteration can be considered to have occurred when there is any net change as compared to the typical or normal level or range, or reference level or range, that cannot be explained by experimental error or sample variation. Thus, the level measured in a particular sample will be compared with the level or range of levels determined in similar samples from a so-called normal subject. In this context, a “normal subject” is an individual with no detectable disease, for example, and a “normal” (sometimes termed “control”) patient or population is/are one(s) that exhibit(s) no detectable disease, respectively, for example. Furthermore, given that analyte is not routinely found at a high level in the majority of the human population, a “normal subject” can be considered an individual with no substantial detectable increased or elevated amount or concentration of analyte, and a “normal” (sometimes termed “control”) patient or population is/are one(s) that exhibit(s) no substantial detectable increased or elevated amount or concentration of analyte. An “apparently normal subject” is one in which analyte has not yet been or currently is being assessed. The level of an analyte is said to be “elevated” when the analyte is normally undetectable (e.g., the normal level is zero, or within a range of from about 25 to about 75 percentiles of normal populations), but is detected in a test sample, as well as when the analyte is present in the test sample at a higher than normal level. Thus, inter alia, the disclosure provides a method of screening for a subject having, or at risk of having, a particular disease, disorder, or condition. The method of assay can also involve the assay of other markers and the like.

[0569] Accordingly, the methods described herein also can be used to determine whether or not a subject has or is at risk of developing a given disease, disorder or condition. Specifically, such a method can comprise the steps of:

[0570] (a) determining the concentration or amount in a test sample from a subject of analyte (or a fragment thereof) (e.g., using the methods described herein, or methods known in the art); and

[0571] (b) comparing the concentration or amount of analyte (or a fragment thereof) determined in step (a) with a predetermined level, wherein, if the concentration or amount of analyte determined in step (a) is favorable with respect to a predetermined level, then the subject is determined not to have or be at risk for a given disease, disorder or condition. However, if the concentration or amount of analyte determined in step (a) is unfavorable with respect to the predetermined level, then the subject is determined to have or be at risk for a given disease, disorder or condition.

[0572] Additionally, provided herein is method of monitoring the progression of disease in a subject. Optimally the method comprising the steps of:

[0573] (a) determining the concentration or amount in a test sample from a subject of analyte;

[0574] (b) determining the concentration or amount in a later test sample from the subject of analyte; and

[0575] (c) comparing the concentration or amount of analyte as determined in step (b) with the concentration or amount of analyte determined in step (a), wherein if the concentration or amount determined in step (b) is unchanged or is unfavorable when compared to the concentration or amount of analyte determined in step (a), then the disease in the subject is determined to have continued, progressed or worsened. By comparison, if the concentration or amount of analyte as determined in step (b) is favorable when compared to the concentration or amount of analyte as determined in step (a), then the disease in the subject is determined to have discontinued, regressed or improved.

[0576] Optionally, the method further comprises comparing the concentration or amount of analyte as determined in step (b), for example, with a predetermined level. Further, optionally the method comprises treating the subject with one or more pharmaceutical compositions for a period of time if the comparison shows that the concentration or amount of analyte as determined in step (b), for example, is unfavorably altered with respect to the predetermined level.

[0577] Still further, the methods can be used to monitor treatment in a subject receiving treatment with one or more pharmaceutical compositions. Specifically, such methods involve providing a first test sample from a subject before the subject has been administered one or more pharmaceutical compositions. Next, the concentration or amount in a first test sample from a subject of analyte is determined (e.g., using the methods described herein or as known in the art). After the concentration or amount of analyte is determined, optionally the concentration or amount of analyte is then compared with a predetermined level. If the concentration or amount of analyte as determined in the first test sample is lower than the predetermined level, then the subject is not treated with one or more pharmaceutical compositions. However, if the concentration or amount of analyte as determined in the first test sample is higher than the predetermined level, then the subject is treated with one or more pharmaceutical compositions for a period of time. The period of time that the subject is treated with the one or more pharmaceutical compositions can be determined by one skilled in the art (for example, the period of time can be from about seven (7) days to about two years, preferably from about fourteen (14) days to about one (1) year).

[0578] During the course of treatment with the one or more pharmaceutical compositions, second and subsequent test samples are then obtained from the subject. The number of test samples and the time in which said test samples are obtained from the subject are not critical. For example, a second test sample could be obtained seven (7) days after the subject is first administered the one or more pharmaceutical compositions, a third test sample could be obtained two (2) weeks after the subject is first administered the one or more pharmaceutical compositions, a fourth test sample could be obtained three (3) weeks after the subject is first administered the one or more pharmaceutical compositions, a fifth test sample could be obtained four (4) weeks after the subject is first administered the one or more pharmaceutical compositions, etc.

[0579] After each second or subsequent test sample is obtained from the subject, the concentration or amount of analyte is determined in the second or subsequent test sample is determined (e.g., using the methods described herein or as known in the art). The concentration or amount of analyte as determined in each of the second and subsequent test samples is then compared with the concentration or amount of analyte as determined in the first test sample (e.g., the test sample that was originally optionally compared to the predetermined level). If the concentration or amount of analyte as determined in step (c) is favorable when compared to the concentration or amount of analyte as determined in step (a), then the disease in the subject is determined to have discontinued, regressed or improved, and the subject should continue to be administered the one or pharmaceutical compositions of step (b). However, if the concentration or amount determined in step (c) is unchanged or is unfavorable when compared to the concentration or amount of analyte as determined in step (a), then the disease in the subject is determined to have continued, progressed or worsened, and the subject should be treated with a higher concentration of the one or more pharmaceutical compositions administered to the subject in step (b) or the subject should be treated with one or more pharmaceutical compositions that are different from the one or more pharmaceutical compositions administered to the subject in step (b). Specifically, the subject can be treated with one or more pharmaceutical compositions that are different from the one or more pharmaceutical compositions that the subject had previously received to decrease or lower said subject's analyte level.

[0580] Generally, for assays in which repeat testing may be done (e.g., monitoring disease progression and/or response to treatment), a second or subsequent test sample is obtained at a period in time after the first test sample has been obtained from the subject. Specifically, a second test sample from the subject can be obtained minutes, hours, days, weeks or years after the first test sample has been obtained from the subject. For example, the second test sample can be obtained from the subject at a time period of about 1 minute, about 5 minutes, about 10 minutes, about 15 minutes, about 30 minutes, about 45 minutes, about 60 minutes, about 2 hours, about 3 hours, about 4 hours, about 5 hours, about 6 hours, about 7 hours, about 8 hours, about 9 hours, about 10 hours, about 11 hours, about 12 hours, about 13 hours, about 14 hours, about 15 hours, about 16 hours, about 17 hours, about 18 hours, about 19 hours, about 20 hours, about 21 hours, about 22 hours, about 23 hours, about 24 hours, about 2 days, about 3 days, about 4 days, about 5 days, about 6 days, about 7 days, about 2 weeks, about 3 weeks, about 4 weeks, about 5 weeks, about 6 weeks, about 7 weeks, about 8 weeks, about 9 weeks, about 10 weeks, about 11 weeks, about 12 weeks, about 13 weeks, about 14 weeks, about 15 weeks, about 16 weeks, about 17 weeks, about 18 weeks, about 19 weeks, about 20 weeks, about 21 weeks, about 22 weeks, about 23 weeks, about 24 weeks, about 25 weeks, about 26 weeks, about 27 weeks, about 28 weeks, about 29 weeks, about 30 weeks, about 31 weeks, about 32 weeks, about 33 weeks, about 34 weeks, about 35 weeks, about 36 weeks, about 37 weeks, about 38 weeks, about 39 weeks, about 40 weeks, about 41 weeks, about 42 weeks, about 43 weeks, about 44 weeks, about 45 weeks, about 46 weeks, about 47 weeks, about 48 weeks, about 49 weeks, about 50 weeks, about 51 weeks, about 52 weeks, about 1.5 years, about 2 years, about 2.5 years, about 3.0 years, about 3.5 years, about 4.0 years, about 4.5 years, about 5.0 years, about 5.5 years, about 6.0 years, about 6.5 years, about 7.0 years, about 7.5 years, about 8.0 years, about 8.5 years, about 9.0 years, about 9.5 years or about 10.0 years after the first test sample from the subject is obtained.

[0581] When used to monitor disease progression, the above assay can be used to monitor the progression of disease in subjects suffering from acute conditions. Acute conditions, also known as critical care conditions, refer to acute, life-threatening diseases or other critical medical conditions involving, for example, the cardiovascular system or excretory system. Typically, critical care conditions refer to those conditions requiring acute medical intervention in a hospital-based setting (including, but not limited to, the emergency room, intensive care unit, trauma center, or other emergent care setting) or administration by a paramedic or other field-based medical personnel. For critical care conditions, repeat monitoring is generally done within a shorter time frame, namely, minutes, hours or days (e.g., about 1 minute, about 5 minutes, about 10 minutes, about 15 minutes, about 30 minutes, about 45 minutes, about 60 minutes, about 2 hours, about 3 hours, about 4 hours, about 5 hours, about 6 hours, about 7 hours, about 8 hours, about 9 hours, about 10 hours, about 11 hours, about 12 hours, about 13 hours, about 14 hours, about 15 hours, about 16 hours, about 17 hours, about 18 hours, about 19 hours, about 20 hours, about 21 hours, about 22 hours, about 23 hours, about 24 hours, about 2 days, about 3 days, about 4 days, about 5 days, about 6 days or about 7 days), and the initial assay likewise is generally done within a shorter timeframe, e.g., about minutes, hours or days of the onset of the disease or condition.

[0582] The assays also can be used to monitor the progression of disease in subjects suffering from chronic or non-acute conditions. Non-critical care or, non-acute conditions, refers to conditions other than acute, life-threatening disease or other critical medical conditions involving, for example, the cardiovascular system and/or excretory system. Typically, non-acute conditions include those of longer-term or chronic duration. For non-acute conditions, repeat monitoring generally is done with a longer timeframe, e.g., hours, days, weeks, months or years (e.g., about 1 hour, about 2 hours, about 3 hours, about 4 hours, about 5 hours, about 6 hours, about 7 hours, about 8 hours, about 9 hours, about 10 hours, about 11 hours, about 12 hours, about 13 hours, about 14 hours, about 15 hours, about 16 hours, about 17 hours, about 18 hours, about 19 hours, about 20 hours, about 21 hours, about 22 hours, about 23 hours, about 24 hours, about 2 days, about 3 days, about 4 days, about 5 days, about 6 days, about 7 days, about 2 weeks, about 3 weeks, about 4 weeks, about 5 weeks, about 6 weeks, about 7 weeks, about 8 weeks, about 9 weeks, about 10 weeks, about 11 weeks, about 12 weeks, about 13 weeks, about 14 weeks, about 15 weeks, about 16 weeks, about 17 weeks, about 18 weeks, about 19 weeks, about 20 weeks, about 21 weeks, about 22 weeks, about 23 weeks, about 24 weeks, about 25 weeks, about 26 weeks, about 27 weeks, about 28 weeks, about 29 weeks, about 30 weeks, about 31 weeks, about 32 weeks, about 33 weeks, about 34 weeks, about 35 weeks, about 36 weeks, about 37 weeks, about 38 weeks, about 39 weeks, about 40 weeks, about 41 weeks, about 42 weeks, about 43 weeks, about 44 weeks, about 45 weeks, about 46 weeks, about 47 weeks, about 48 weeks, about 49 weeks, about 50 weeks, about 51 weeks, about 52 weeks, about 1.5 years, about 2 years, about 2.5 years, about 3.0 years, about 3.5 years, about 4.0 years, about 4.5 years, about 5.0 years, about 5.5 years, about 6.0 years, about 6.5 years, about 7.0 years, about 7.5 years, about 8.0 years, about 8.5 years, about 9.0 years, about 9.5 years or about 10.0 years), and the initial assay likewise generally is done within a longer time frame, e.g., about hours, days, months or years of the onset of the disease or condition.

[0583] Furthermore, the above assays can be performed using a first test sample obtained from a subject where the first test sample is obtained from one source, such as urine, serum or plasma. Optionally, the above assays can then be repeated using a second test sample obtained from the subject where the second test sample is obtained from another source. For example, if the first test sample was obtained from urine, the second test sample can be obtained from serum or plasma. The results obtained from the assays using the first test sample and the second test sample can be compared. The comparison can be used to assess the status of a disease or condition in the subject.

[0584] Moreover, the present disclosure also relates to methods of determining whether a subject predisposed to or suffering from a given disease, disorder or condition will benefit from treatment. In particular, the disclosure relates to analyte companion diagnostic methods and products. Thus, the method of “monitoring the treatment of disease in a subject” as described herein further optimally also can encompass selecting or identifying candidates for therapy.

[0585] Thus, in particular embodiments, the disclosure also provides a method of determining whether a subject having, or at risk for, a given disease, disorder or condition is a candidate for therapy. Generally, the subject is one who has experienced some symptom of a given disease, disorder or condition or who has actually been diagnosed as having, or being at risk for, a given disease, disorder or condition, and/or who demonstrates an unfavorable concentration or amount of analyte or a fragment thereof, as described herein.

[0586] The method optionally comprises an assay as described herein, where analyte is assessed before and following treatment of a subject with one or more pharmaceutical compositions (e.g., particularly with a pharmaceutical related to a mechanism of action involving analyte), with immunosuppressive therapy, or by immunoabsorption therapy, or where analyte is assessed following such treatment and the concentration or the amount of analyte is compared against a predetermined level. An unfavorable concentration of amount of analyte observed following treatment confirms that the subject will not benefit from receiving further or continued treatment, whereas a favorable concentration or amount of analyte observed following treatment confirms that the subject will benefit from receiving further or continued treatment. This confirmation assists with management of clinical studies, and provision of improved patient care.

[0587] It goes without saying that, while certain embodiments herein are advantageous when employed to assess a given disease, disorder or condition as discussed herein, the assays and kits can be employed to assess analyte in other diseases, disorders and conditions. The method of assay can also involve the assay of other markers and the like.

[0588] The method of assay also can be used to identify a compound that ameliorates a given disease, disorder or condition. For example, a cell that expresses analyte can be contacted with a candidate compound. The level of expression of analyte in the cell contacted with the compound can be compared to that in a control cell using the method of assay described herein.

### II. Kit

[0589] A kit for assaying a test sample for the presence, amount or concentration of an analyte (or a fragment thereof) in a test sample is also provided. The kit comprises at least one component for assaying the test sample for the analyte (or a fragment thereof) and instructions for assaying the test sample for the analyte (or a fragment thereof). The at least one component for assaying the test sample for the analyte (or a fragment thereof) can include a composition comprising an anti-analyte DVD-Ig (or a fragment, a variant, or a fragment of a variant thereof), which is optionally immobilized on a solid phase.

[0590] The kit can comprise at least one component for assaying the test sample for an analyte by immunoassay, e.g., chemiluminescent microparticle immunoassay, and instructions for assaying the test sample for an analyte by immunoassay, e.g., chemiluminescent microparticle immunoassay. For example, the kit can comprise at least one specific binding partner for an analyte, such as an anti-analyte, monoclonal/polyclonal antibody (or a fragment thereof that can bind to the analyte, a variant thereof that can bind to the analyte, or a fragment of a variant that can bind to the analyte) or an anti-analyte DVD-Ig (or a fragment, a variant, or a fragment of a variant thereof), either of which can be detectably labeled. Alternatively or additionally, the kit can comprise detectably labeled analyte (or a fragment thereof that can bind to an anti-analyte, monoclonal/polyclonal antibody or an anti-analyte DVD-Ig (or a fragment, a variant, or a fragment of a variant thereof)), which can compete with any analyte in a test sample for binding to an anti-analyte, monoclonal/polyclonal antibody (or a fragment thereof that can bind to the analyte, a variant thereof that can bind to the analyte, or a fragment of a variant that can bind to the analyte) or an anti-analyte DVD-Ig (or a fragment, a variant, or a fragment of a variant thereof), either of which can be immobilized on a solid support. The kit can comprise a calibrator or control, e.g., isolated or purified analyte. The kit can comprise at least one container (e.g., tube, microtiter plates or strips, which can be already coated with a first specific binding partner, for example) for conducting the assay, and/or a buffer, such as an assay buffer or a wash buffer, either one of which can be provided as a concentrated solution, a substrate solution for the detectable label (e.g., an enzymatic label), or a stop solution. Preferably, the kit comprises all components, i.e., reagents, standards, buffers, diluents, etc., which are necessary to perform the assay. The instructions can be in paper form or computer-readable form, such as a disk, CD, DVD, or the like.

[0591] Any antibodies, such as an anti-analyte antibody or an anti-analyte DVD-Ig, or tracer can incorporate a detectable label as described herein, such as a fluorophore, a radioactive moiety, an enzyme, a biotin/avidin label, a chromophore, a chemiluminescent label, or the like, or the kit can include reagents for carrying out detectable labeling. The antibodies, calibrators and/or controls can be provided in separate containers or pre-dispensed into an appropriate assay format, for example, into microtiter plates.

[0592] Optionally, the kit includes quality control components (for example, sensitivity panels, calibrators, and positive controls). Preparation of quality control reagents is well-known in the art and is described on insert sheets for a variety of immunodiagnostic products. Sensitivity panel members optionally are used to establish assay performance characteristics, and further optionally are useful indicators of the integrity of the immunoassay kit reagents, and the standardization of assays.

[0593] The kit can also optionally include other reagents required to conduct a diagnostic assay or facilitate quality control evaluations, such as buffers, salts, enzymes, enzyme co-factors, enzyme substrates, detection reagents, and the like. Other components, such as buffers and solutions for the isolation and/or treatment of a test sample (e.g., pretreatment reagents), also can be included in the kit. The kit can additionally include one or more other controls. One or more of the components of the kit can be lyophilized, in which case the kit can further comprise reagents suitable for the reconstitution of the lyophilized components.

[0594] The various components of the kit optionally are provided in suitable containers as necessary, e.g., a microtiter plate. The kit can further include containers for holding or storing a sample (e.g., a container or cartridge for a urine sample). Where appropriate, the kit optionally also can contain reaction vessels, mixing vessels, and other components that facilitate the preparation of reagents or the test sample. The kit can also include one or more instruments for assisting with obtaining a test sample, such as a syringe, pipette, forceps, measured spoon, or the like.

[0595] If the detectable label is at least one acridinium compound, the kit can comprise at least one acridinium-9-carboxamide, at least one acridinium-9-carboxylate aryl ester, or any combination thereof. If the detectable label is at least one acridinium compound, the kit also can comprise a source of hydrogen peroxide, such as a buffer, a solution, and/or at least one basic solution. If desired, the kit can contain a solid phase, such as a magnetic particle, bead, test tube, microtiter plate, cuvette, membrane, scaffolding molecule, film, filter paper, disc or chip.

### III. Adaptation of Kit and Method

[0596] The kit (or components thereof), as well as the method of determining the presence, amount or concentration of an analyte in a test sample by an assay, such as an immunoassay as described herein, can be adapted for use in a variety of automated and semi-automated systems (including those wherein the solid phase comprises a microparticle), as described, e.g., in U.S. Pat. Nos. 5,089,424 and 5,006,309, and as commercially marketed, e.g., by Abbott Laboratories (Abbott Park, Ill.) as ARCHITECT®.

[0597] Some of the differences between an automated or semi-automated system as compared to a non-automated system (e.g., ELISA) include the substrate to which the first specific binding partner (e.g., an anti-analyte, monoclonal/polyclonal antibody (or a fragment thereof, a variant thereof, or a fragment of a variant thereof) or an anti-analyte DVD-Ig (or a fragment thereof, a variant thereof, or a fragment of a variant thereof) is attached; either way, sandwich formation and analyte reactivity can be impacted), and the length and timing of the capture, detection and/or any optional wash steps. Whereas a non-automated format, such as an ELISA, may require a relatively longer incubation time with sample and capture reagent (e.g., about 2 hours), an automated or semi-automated format (e.g., ARCHITECT®, Abbott Laboratories) may have a relatively shorter incubation time (e.g., approximately 18 minutes for ARCHITECT®). Similarly, whereas a non-automated format, such as an ELISA, may incubate a detection antibody, such as the conjugate reagent, for a relatively longer incubation time (e.g., about 2 hours), an automated or semi-automated format (e.g., ARCHITECT®) may have a relatively shorter incubation time (e.g., approximately 4 minutes for the ARCHITECT®).

[0598] Other platforms available from Abbott Laboratories include, but are not limited to, AxSYM®, IMx® (see, e.g., U.S. Pat. No. 5,294,404, which is hereby incorporated by reference in its entirety), PRISM®, EIA (bead), and Quantum™ II, as well as other platforms. Additionally, the assays, kits and kit components can be employed in other formats, for example, on electrochemical or other hand-held or point-of-care assay systems. The present disclosure is, for example, applicable to the commercial Abbott Point of Care (i-STAT®, Abbott Laboratories) electrochemical immunoassay system that performs sandwich immunoassays Immunosensors and their methods of manufacture and operation in single-use test devices are described, for example in, U.S. Pat. No. 5,063,081, U.S. Pat. App. Pub. No. 2003/0170881, U.S. Pat. App. Pub. No. 2004/0018577, U.S. Pat. App. Pub. No. 2005/0054078, and U.S. Pat. App. Pub. No. 2006/0160164, which are incorporated in their entireties by reference for their teachings regarding same.

[0599] In particular, with regard to the adaptation of an analyte assay to the I-STAT® system, the following configuration is preferred. A microfabricated silicon chip is manufactured with a pair of gold amperometric working electrodes and a silver-silver chloride reference electrode. On one of the working electrodes, polystyrene beads (0.2 mm diameter) with immobilized anti-analyte, monoclonal/polyclonal antibody (or a fragment thereof, a variant thereof, or a fragment of a variant thereof) or anti-analyte DVD-Ig (or a fragment thereof, a variant thereof, or a fragment of a variant thereof), are adhered to a polymer coating of patterned polyvinyl alcohol over the electrode. This chip is assembled into an I-STAT® cartridge with a fluidics format suitable for immunoassay. On a portion of the wall of the sample-holding chamber of the cartridge there is a layer comprising a specific binding partner for an analyte, such as an anti-analyte, monoclonal/polyclonal antibody (or a fragment thereof, a variant thereof, or a fragment of a variant thereof that can bind the analyte) or an anti-analyte DVD-Ig (or a fragment thereof, a variant thereof, or a fragment of a variant thereof that can bind the analyte), either of which can be detectably labeled. Within the fluid pouch of the cartridge is an aqueous reagent that includes p-aminophenol phosphate.

[0600] In operation, a sample suspected of containing an analyte is added to the holding chamber of the test cartridge, and the cartridge is inserted into the I-STAT® reader. After the specific binding partner for an analyte has dissolved into the sample, a pump element within the cartridge forces the sample into a conduit containing the chip. Here it is oscillated to promote formation of the sandwich. In the penultimate step of the assay, fluid is forced out of the pouch and into the conduit to wash the sample off the chip and into a waste chamber. In the final step of the assay, the alkaline phosphatase label reacts with p-aminophenol phosphate to cleave the phosphate group and permit the liberated p-aminophenol to be electrochemically oxidized at the working electrode. Based on the measured current, the reader is able to calculate the amount of analyte in the sample by means of an embedded algorithm and factory-determined calibration curve.

[0601] It further goes without saying that the methods and kits as described herein necessarily encompass other reagents and methods for carrying out the immunoassay. For instance, encompassed are various buffers such as are known in the art and/or which can be readily prepared or optimized to be employed, e.g., for washing, as a conjugate diluent, microparticle diluent, and/or as a calibrator diluent. An exemplary conjugate diluent is ARCHITECT® conjugate diluent employed in certain kits (Abbott Laboratories, Abbott Park, Ill.) and containing 2-(N-morpholino)ethanesulfonic acid (MES), a salt, a protein blocker, an antimicrobial agent, and a detergent. An exemplary calibrator diluent is ARCHITECT® human calibrator diluent employed in certain kits (Abbott Laboratories, Abbott Park, Ill.), which comprises a buffer containing MES, other salt, a protein blocker, and an antimicrobial agent. Additionally, as described in U.S. Patent Application No. 61/142,048 filed Dec. 31, 2008, improved signal generation may be obtained, e.g., in an I-Stat cartridge format, using a nucleic acid sequence linked to the signal antibody as a signal amplifier.

### EXEMPLIFICATION

### Example 1

### Design, Construction, and Analysis of a DVD-Ig

### Example 1.1

### Assays Used to Identify and Characterize Parent Antibodies and DVD-Ig

[0602] The following assays were used throughout the Examples to identify and characterize parent antibodies and DVD-Ig, unless otherwise stated.

### Example 1.1.1

### Assays Used to Determine Binding and Affinity of Parent Antibodies and DVD-Ig for Their Target Antigen(s)

### Example 1.1.1A

### Direct Bind ELISA

[0603] Enzyme Linked Immunosorbent Assays to screen for antibodies that bind a desired target antigen were performed as follows. High bind ELISA plates (Corning Costar # 3369, Acton, Mass.) were coated with 100 μL/well of 10 μg/ml of desired target antigen (R&D Systems, Minneapolis, Minn.) or desired target antigen extra-cellular domain/FC fusion protein (R&D Systems, Minneapolis, Minn.) or monoclonal mouse anti-polyHistidine antibody (R&D Systems # MAB050, Minneapolis, Minn.) in phosphate buffered saline (10×PBS, Abbott Bioresearch Center, Media Prep# MPS-073, Worcester, Mass.) overnight at 4° C. Plates were washed four times with PBS containing 0.02% Tween 20. Plates were blocked by the addition of 300 μL/well blocking solution (non-fat dry milk powder, various retail suppliers, diluted to 2% in PBS) for ½ hour at room temperature. Plates were washed four times after blocking with PBS containing 0.02% Tween 20.

[0604] Alternatively, one hundred microliters per well of 10 μg/ml of Histidine (His) tagged desired target antigen (R&D Systems, Minneapolis, Minn.) was added to ELISA plates coated with monoclonal mouse anti-polyHistidine antibody as described above and incubated for 1 hour at room temperature. Wells were washed four times with PBS containing 0.02% Tween 20.

[0605] One hundred microliters of antibody or DVD-Ig preparations diluted in blocking solution as described above was added to the desired target antigen plate or desired target antigen/FC fusion plate or the anti-polyHistidine antibody/His tagged desired target antigen plate prepared as described above and incubated for 1 hour at room temperature. Wells are washed four times with PBS containing 0.02% Tween 20.

[0606] One hundred microliters of 10 ng/mL goat anti-human IgG FC specific HRP conjugated antibody (Southern Biotech # 2040-05, Birmingham, Ala.) was added to each well of the desired target antigen plate or anti-polyHistidine antibody/Histidine tagged desired target antigen plate. Alternatively, one hundred microliters of 10 ng/mL goat anti-human IgG kappa light chain specific HRP conjugated antibody (Southern Biotech # 2060-05 Birmingham, Ala.) was added to each well of the desired target antigen/FC fusion plate and incubated for 1 hour at room temperature. Plates were washed 4 times with PBS containing 0.02% Tween 20.

[0607] One hundred microliters of enhanced TMB solution (Neogen Corp. #308177, K Blue, Lexington, Ky.) was added to each well and incubated for 10 minutes at room temperature. The reaction was stopped by the addition of 50 μL 1N sulphuric acid. Plates were read spectrophotometrically at a wavelength of 450 nm.

[0608] Table 3 contains a list of the antigens used in the Direct Bind Assay.

[0609] Table 4 contains the binding data expressed as EC50 in nM for those antibodies and DVD-Ig constructs tested in the Direct Bind ELISA assay.

[0610] In the Direct Bind ELISA, binding was sometimes not observed, probably because the antibody binding site on the target antigen was either “masked” or the antigen is “distorted” when coated to the plastic surface. The inability of a DVD-Ig to bind its target may also be due to steric limitation imposed on DVD-Ig by the Direct Bind ELISA format. The parent antibodies and DVD-Igs that did not bind in the Direct Bind ELISA format bound to target antigen in other ELISA formats, such as FACS, Biacore or bioassay. Non-binding of a DVD-Ig was also restored by adjusting the linker length between the two variable domains of the DVD-Ig, as shown previously.

TABLE 3
Antigens Used in Direct Bind ELISA

| Assay | Antigen | Vendor Designation | Vendor | Catalog # |
|---|---|---|---|---|
| CD-22 | CD22/FC | Siglec-2 ECD/FC | R&D | 1968-SL-050 |
| | | chimera | | |
| CD-40 | CD40/FC | CD40 ECD/FC | R&D | 1493-CD-050 |
| | | chimera-His tag | | |
| CD-80 | CD80/FC | B7-1 ECD/FC chimera | R&D | 140-B1-100 |
| DLL4 | DLL4 | DLL4 ECD/His tag | R&D | 1506-D4-050 |
| EGFR | EGFR/FC | EGFR ECD/FC chimera | R&D | 344-ER-050 |
| HER-2 | HER-2/FC | ErbB2 ECD/FC | R&D | 1129-ER-050 |
| | | chimera-His tag | | |
| HGF | HGF | HGF-His tag | R&D | 294-HG-025 |
| IGF1 | IGF1 | IGF-I | R&D | 291-G1-050 |
| IGF2 | IGF2 | IGF-2 | R&D | 292-G2-050 |
| IGF1R | IGF1R | IGF1R ECD | R&D | 391-GR-050 |
| NRP1 | NRP1 | Neuropilin-1 Npn-1-His | R&D | 3870-N1-025 |
| | | tag | | |
| PlGF | PlGF | Placental GF | R&D | 264-PG-050 |
| RON | RON | MSP Receptor ECD-His | R&D | 1947-MS-050 |
| | | tag | | |
| VEGF | VEGF | VEGF 1-165 aa | R&D | 293-VE-010 |
| ErbB3 | ErbB3 | ErbB3 ECD/FC | R&D | 348-RB-050 |
| | | Chimera-His tag | | |

ECD = Extracellular Domain
/FC chimera = antigen/IgG FC domain fusion protein

TABLE 4
Direct Bind ELISA Of Parent Antibodies And DVD-Ig Constructs

| Parent | | C- | | |
|---|---|---|---|---|
| Antibody | N-terminal | terminal | Direct Bind | Direct Bind |
| or | Variable | Variable | ELISA | ELISA |
| DVD-Ig | Domain | Domain | N-terminal VD | C-terminal VD |
| ID | (VD) | (VD) | EC50 (nM) | EC50 (nM) |
| AB006 | CD-19 | | 0.04 | |
| AB001 | CD-20 | | | |
| DVD001 | CD-20 | CD-19 | | 12.93 |
| DVD002 | CD-19 | CD-20 | 0.07 | |
| AB007 | CD-80 | | 0.77 | |
| AB001 | CD-20 | | | |
| DVD005 | CD-20 | CD-80 | | 9.77 |
| DVD006 | CD-80 | CD-20 | 1.09 | |
| AB008 | CD-22 | | 3.44 | |
| AB001 | CD-20 | | | |
| DVD007 | CD-20 | CD-22 | | 30.54 |
| DVD008 | CD-22 | CD-20 | 4.79 | |
| AB009 | CD-40 | | 0.99 | |
| AB001 | CD-20 | | | |
| DVD009 | CD-20 | CD-40 | | 3.55 |
| DVD010 | CD-40 | CD-20 | 0.82 | |
| AB002 | CD-3 | | | |
| AB004 | HER-2 | | 0.15 | |
| DVD011 | CD-3 | HER-2 | | 6.63 |
| DVD012 | HER-2 | CD-3 | 1.24 | |
| AB002 | CD-3 | | | |
| AB006 | CD-19 | | 0.14 | |
| DVD013 | CD-3 | CD-19 | | 7.29 |
| DVD014 | CD-19 | CD-3 | 0.12 | |
| AB033 | EGFR | | 0.66 | |
| AB004 | HER-2 | | 1.9 | |
| DVD015 | EGFR | HER-2 | 0.41 | 148.48 |
| DVD016 | HER-2 | EGFR | 1.25 | 5.23 |
| AB002 | CD-3 | | | |
| AB033 | EGFR | | 0.28 | |
| DVD017 | EGFR | CD-3 | 0.3 | |
| DVD018 | CD-3 | EGFR | | 1.93 |
| AB033 | EGFR | | 0.27 | |
| AB011 | IGF1R | | 0.28 | |
| DVD021 | EGFR | IGF1R | 0.33 | 134.95 |
| DVD022 | IGF1R | EGFR | 0.26 | 0.74 |
| AB005 | RON | | 0.26 | |
| AB033 | EGFR | | 0.28 | |
| DVD023 | EGFR | RON | 0.23 | 40.18 |
| DVD024 | RON | EGFR | 0.54 | 1.87 |
| AB033 | EGFR | | 0.27 | |
| AB012 | HGF | | 0.22 | |
| DVD025 | EGFR | HGF | 0.31 | 251.45 |
| DVD026 | HGF | EGFR | 0.33 | 7.89 |
| AB004 | HER-2 | | 0.44 | |
| AB010 | IGF1,2 | | 4.77/10.02 | |
| DVD029 | HER-2 | IGF1/IGF2 | 1226.04 | 229.33/206.12 |
| DVD030 | IGF1/IGF2 | HER-2 | 1.75/5.49 | 10.65 |
| AB004 | HER-2 | | 0.15 | |
| AB011 | IGF1R | | 0.28 | |
| DVD031 | HER-2 | IGF1R | 0.28 | 171.04 |
| DVD032 | IGF1R | HER-2 | 0.16 | 11.03 |
| AB005 | RON | | 0.21 | |
| AB012 | HGF | | 0.19 | |
| DVD033 | RON | HGF | 0.22 | 11.95 |
| DVD034 | HGF | RON | 0.27 | 116.46 |
| AB014 | VEGF | | 0.87 | |
| AB033 | EGFR | | 0.28 | |
| DVD035 | VEGF | EGFR | 0.74 | 1.24 |
| DVD036 | EGFR | VEGF | 0.18 | 336.13 |
| AB014 | VEGF | | 2.71 | |
| AB004 | HER-2 | | 0.15 | |
| DVD037 | VEGF | HER-2 | 1.86 | 1.44 |
| DVD038 | HER-2 | VEGF | 0.66 | 106.77 |
| AB001 | CD-20 | | | |
| AB014 | VEGF | | 2.71 | |
| DVD039 | VEGF | CD-20 | 1.27 | |
| DVD040 | CD-20 | VEGF | | 71.18 |
| AB014 | VEGF | | 0.87 | |
| AB010 | IGF1,2 | | 4.77/18.13 | |
| DVD041 | VEGF | IGF1/IGF2 | 0.68 | 381.18/7335.24 |
| DVD042 | IGF1/IGF2 | VEGF | 2.54/17.62 | 42.3 |
| AB015 | DLL-4 | | 0.31 | |
| AB014 | VEGF | | 2.71 | |
| DVD043 | VEGF | DLL4 | 28.25 | 2.12 |
| DVD044 | DLL4 | VEGF | 0.53 | 10.88 |
| AB014 | VEGF | | 2.95 | |
| AB012 | HGF | | 0.19 | |
| DVD045 | VEGF | HGF | 2.87 | 184.53 |
| DVD046 | HGF | VEGF | 0.5 | 46.3 |
| AB005 | RON | | 0.26 | |
| AB014 | VEGF | | 2.95 | |
| DVD047 | VEGF | RON | 19.2 | 94.82 |
| DVD048 | RON | VEGF | 0.46 | 42.95 |
| AB014 | VEGF | | 2.95 | |
| AB016 | NRP1 | | 0.58 | |
| DVD049 | VEGF | NRP1 | 1.71 | 0.5 |
| DVD050 | NRP1 | VEGF | 0.46 | 219.02 |
| AB015 | DLL-4 | | 0.31 | |
| AB047 | PlGF | | 0.2 | |
| DVD257 | DLL4 | PlGF | 0.28 | 2 |
| DVD258 | PlGF | DLL4 | 0.08 | 2.3 |
| AB014 | VEGF | | 1.09 | |
| AB047 | PlGF | | 0.2 | |
| DVD259 | VEGF | PlGF | 0.79 | 1.3 |
| DVD260 | PlGF | VEGF | 0.12 | 19.06 |
| AB062 | ErbB3 | | 1.93 | |
| AB033 | EGFR | | 0.68 | |
| DVD299 | ErbB3 | EGFR | 1.96 | 17.38 |
| DVD300 | EGFR | ErbB3 | 0.49 | 7633.3 |
| AB063 | ErbB3 | | 0.28 | |
| AB033 | EGFR | | 0.68 | |
| DVD305 | ErbB3 | EGFR | 0.44 | 24.39 |
| DVD306 | EGFR | ErbB3 | 0.36 | 150.92 |

[0611] Binding of all DVD-Ig constructs was maintained and comparable to that of parent antibodies. All N-terminal variable domains bound with a similar high affinity as the parent antibody as well as the C-terminal variable domains of DVD-Ig constructs DVD009, DVD016, DVD018, DVD022, DVD024, DVD035, DVD37, DVD043, DVD044, DVD49, DVD257, DVD258 and DVD259.

[0612] Tables 5 and 6 contain VEGF Direct Bind ELISA data for three VEGF parent antibodies and 96 DVD-Ig constructs with either C-terminal (C-term.) or N-terminal (N-term.) variable domains derived from the variable domains of the parent VEGF Reference Antibodies (Ref Ab.) AB014-VEGF (seq. 1), AB071-VEGF (seq. 2) and AB070-VEGF (seq. 3). These variable domains are paired with four DLL-4 variable domains derived from four DLL-4 Ref. Ab. (AB015-DLL-4 (seq. 1), AB069-DLL-4 (seq. 2), AB073-DLL-4 (seq. 3), and AB072-DLL-4 (seq. 4). The DVD-Ig variable domains are connected by 2 linker lengths (Short and Long in either the heavy chain (HC linker) and/or light chain (LC linker), resulting in four possible linker combinations: Short-Short, Long-Long, Short-Long and Long-Short. The combination of these 5 factors (3 VEGF sequences×2 Orientations×2 HC Linkers×2 LC Linkers×4 DLL-4 sequences) results in the full factorial experiment of 96 DVDs.

TABLE 5

Direct Bind ELISA Of 96 DVD Constructs With Various
VEGF Sequences, Orientations And Linker
Length Combinations To VEGF

| | | | | | | | | |
|---|---|---|---|---|---|---|---|---|
| | | | | | | DVD | | RefAb |
| | | | | | Other | VEGF | | VEGF |
| | Sequence | | HC | LC | DVD | EC50 | Ref. | EC50 |
| DVD ID | ID | Position | Linker | Linker | Domain | (nM) | Ab. ID | (nM) |

| | | | | | | | | |
|---|---|---|---|---|---|---|---|---|
| DVD043 | VEGF | N-term. | Short | Short | DLL4 | 1.25 | AB014 | 2.36 |
| | (Seq. 1) | | | | (seq. 1) | | | |
| DVD044 | VEGF | C-term. | Short | Short | DLL4 | 407.52 | AB014 | 2.36 |
| | (Seq. 1) | | | | (seq. 1) | | | |
| DVD469 | VEGF | C-term. | Long | Long | DLL4 | 1262.59 | AB014 | 2.36 |
| | (Seq. 1) | | | | (seq. 1) | | | |
| DVD470 | VEGF | N-term. | Long | Long | DLL4 | 1.87 | AB014 | 2.36 |
| | (Seq. 1) | | | | (seq. 1) | | | |
| DVD475 | VEGF | C-term. | Long | Short | DLL4 | 19.17 | AB014 | 1.51 |
| | (Seq. 1) | | | | (seq. 1) | | | |
| DVD476 | VEGF | N-term. | Long | Short | DLL4 | 0.55 | AB014 | 1.51 |
| | (Seq. 1) | | | | (seq. 1) | | | |
| DVD481 | VEGF | C-term. | Short | Long | DLL4 | 150.24 | AB014 | 1.51 |
| | (Seq. 1) | | | | (seq. 1) | | | |
| DVD482 | VEGF | N-term. | Short | Long | DLL4 | 1.30 | AB014 | 1.51 |
| | (Seq. 1) | | | | (seq. 1) | | | |
| DVD467 | VEGF | C-term. | Short | Short | DLL4 | 1805.23 | AB071 | 60.82 |
| | (Seq. 2) | | | | (seq. 1) | | | |
| DVD468 | VEGF | N-term. | Short | Short | DLL4 | 25.55 | AB071 | 60.82 |
| | (Seq. 2) | | | | (seq. 1) | | | |
| DVD473 | VEGF | C-term. | Long | Long | DLL4 | 388.01 | AB071 | 60.82 |
| | (Seq. 2) | | | | (seq. 1) | | | |
| DVD474 | VEGF | N-term. | Long | Long | DLL4 | 17.93 | AB071 | 60.82 |
| | (Seq. 2) | | | | (seq. 1) | | | |
| DVD479 | VEGF | C-term. | Long | Short | DLL4 | 455.50 | AB071 | 68.55 |
| | (Seq. 2) | | | | (seq. 1) | | | |
| DVD480 | VEGF | N-term. | Long | Short | DLL4 | 22.98 | AB071 | 68.55 |
| | (Seq. 2) | | | | (seq. 1) | | | |
| DVD485 | VEGF | C-term. | Short | Long | DLL4 | 121.21 | AB071 | 68.55 |
| | (Seq. 2) | | | | (seq. 1) | | | |
| DVD486 | VEGF | N-term. | Short | Long | DLL4 | 27.96 | AB071 | 68.55 |
| | (Seq. 2) | | | | (seq. 1) | | | |
| DVD465 | VEGF | C-term. | Short | Short | DLL4 | 396.45 | AB070 | 1.82 |
| | (Seq. 3) | | | | (seq. 1) | | | |
| DVD466 | VEGF | N-term. | Short | Short | DLL4 | 2.61 | AB070 | 1.82 |
| | (Seq. 3) | | | | (seq. 1) | | | |
| DVD471 | VEGF | C-term. | Long | Long | DLL4 | 30.05 | AB070 | 1.82 |
| | (Seq. 3) | | | | (seq. 1) | | | |
| DVD472 | VEGF | N-term. | Long | Long | DLL4 | 9.22 | AB070 | 1.82 |
| | (Seq. 3) | | | | (seq. 1) | | | |
| DVD477 | VEGF | C-term. | Long | Short | DLL4 | 41.66 | AB070 | 3.59 |
| | (Seq. 3) | | | | (seq. 1) | | | |
| DVD478 | VEGF | N-term. | Long | Short | DLL4 | 2.72 | AB070 | 3.59 |
| | (Seq. 3) | | | | (seq. 1) | | | |
| DVD483 | VEGF | C-term. | Short | Long | DLL4 | 46.09 | AB070 | 3.59 |
| | (Seq. 3) | | | | (seq. 1) | | | |
| DVD484 | VEGF | N-term. | Short | Long | DLL4 | 4.84 | AB070 | 3.59 |
| | (Seq. 3) | | | | (seq. 1) | | | |
| DVD441 | VEGF | C-term. | Short | Short | DLL4 | 247.99 | AB014 | 1.52 |
| | (Seq. 1) | | | | (seq. 2) | | | |
| DVD442 | VEGF | N-term. | Short | Short | DLL4 | 0.59 | AB014 | 1.52 |
| | (Seq. 1) | | | | (seq. 2) | | | |
| DVD447 | VEGF | C-term. | Long | Long | DLL4 | 5.05 | AB014 | 1.52 |
| | (Seq. 1) | | | | (seq. 2) | | | |
| DVD448 | VEGF | N-term. | Long | Long | DLL4 | 1.59 | AB014 | 1.52 |
| | (Seq. 1) | | | | (seq. 2) | | | |
| DVD453 | VEGF | C-term. | Long | Short | DLL4 | 35.28 | AB014 | 1.50 |
| | (Seq. 1) | | | | (seq. 2) | | | |
| DVD454 | VEGF | N-term. | Long | Short | DLL4 | 1.43 | AB014 | 1.50 |
| | (Seq. 1) | | | | (seq. 2) | | | |
| DVD459 | VEGF | C-term. | Short | Long | DLL4 | 6.17 | AB014 | 1.50 |
| | (Seq. 1) | | | | (seq. 2) | | | |
| DVD460 | VEGF | N-term. | Short | Long | DLL4 | 0.94 | AB014 | 1.50 |
| | (Seq. 1) | | | | (seq. 2) | | | |
| DVD445 | VEGF | C-term. | Short | Short | DLL4 | 14482.02 | AB071 | 48.07 |
| | (Seq. 2) | | | | (seq. 2) | | | |
| DVD446 | VEGF | N-term. | Short | Short | DLL4 | 14.38 | AB071 | 48.07 |
| | (Seq. 2) | | | | (seq. 2) | | | |
| DVD451 | VEGF | C-term. | Long | Long | DLL4 | 2404.95 | AB071 | 48.07 |
| | (Seq. 2) | | | | (seq. 2) | | | |
| DVD452 | VEGF | N-term. | Long | Long | DLL4 | 17.75 | AB071 | 48.07 |
| | (Seq. 2) | | | | (seq. 2) | | | |
| DVD457 | VEGF | C-term. | Long | Short | DLL4 | 1475.74 | AB071 | 40.24 |
| | (Seq. 2) | | | | (seq. 2) | | | |
| DVD458 | VEGF | N-term. | Long | Short | DLL4 | 21.51 | AB071 | 40.24 |
| | (Seq. 2) | | | | (seq. 2) | | | |
| DVD463 | VEGF | C-term. | Short | Long | DLL4 | 1730.97 | AB071 | 40.24 |
| | (Seq. 2) | | | | (seq. 2) | | | |
| DVD464 | VEGF | N-term. | Short | Long | DLL4 | 19.31 | AB071 | 40.24 |
| | (Seq. 2) | | | | (seq. 2) | | | |
| DVD443 | VEGF | C-term. | Short | Short | DLL4 | 610.53 | AB070 | 1.05 |
| | (Seq. 3) | | | | (seq. 2) | | | |
| DVD444 | VEGF | N-term. | Short | Short | DLL4 | 2.44 | AB070 | 1.05 |
| | (Seq. 3) | | | | (seq. 2) | | | |
| DVD449 | VEGF | C-term. | Long | Long | DLL4 | 15.61 | AB070 | 1.05 |
| | (Seq. 3) | | | | (seq. 2) | | | |
| DVD450 | VEGF | N-term. | Long | Long | DLL4 | 12.06 | AB070 | 1.05 |
| | (Seq. 3) | | | | (seq. 2) | | | |
| DVD455 | VEGF | C-term. | Long | Short | DLL4 | 26.71 | AB070 | 1.11 |
| | (Seq. 3) | | | | (seq. 2) | | | |
| DVD456 | VEGF | N-term. | Long | Short | DLL4 | 1.63 | AB070 | 1.11 |
| | (Seq. 3) | | | | (seq. 2) | | | |
| DVD461 | VEGF | C-term. | Short | Long | DLL4 | 10.44 | AB070 | 1.11 |
| | (Seq. 3) | | | | (seq. 2) | | | |
| DVD462 | VEGF | N-term. | Short | Long | DLL4 | 8.00 | AB070 | 1.11 |
| | (Seq. 3) | | | | (seq. 2) | | | |
| DVD511 | VEGF | C-term. | Short | Short | DLL4 | 35.11 | AB014 | 0.75 |
| | (Seq. 1) | | | | (seq. 3) | | | |
| DVD512 | VEGF | N-term. | Short | Short | DLL4 | 0.71 | AB014 | 0.75 |
| | (Seq. 1) | | | | (seq. 3) | | | |
| DVD517 | VEGF | C-term. | Long | Long | DLL4 | 9.78 | AB014 | 0.75 |
| | (Seq. 1) | | | | (seq. 3) | | | |
| DVD518 | VEGF | N-term. | Long | Long | DLL4 | 162.44 | AB014 | 0.75 |
| | (Seq. 1) | | | | (seq. 3) | | | |
| DVD523 | VEGF | C-term. | Long | Short | DLL4 | 9.67 | AB014 | 0.49 |
| | (Seq. 1) | | | | (seq. 3) | | | |
| DVD524 | VEGF | N-term. | Long | Short | DLL4 | 0.30 | AB014 | 0.49 |
| | (Seq. 1) | | | | (seq. 3) | | | |
| DVD529 | VEGF | C-term. | Short | Long | DLL4 | 2.64 | AB014 | 0.49 |
| | (Seq. 1) | | | | (seq. 3) | | | |
| DVD530 | VEGF | N-term. | Short | Long | DLL4 | 0.79 | AB014 | 0.49 |
| | (Seq. 1) | | | | (seq. 3) | | | |
| DVD515 | VEGF | C-term. | Short | Short | DLL4 | 3015.10 | AB071 | 35.19 |
| | (Seq. 2) | | | | (seq. 3) | | | |
| DVD516 | VEGF | N-term. | Short | Short | DLL4 | 24.65 | AB071 | 35.19 |
| | (Seq. 2) | | | | (seq. 3) | | | |
| DVD521 | VEGF | C-term. | Long | Long | DLL4 | 654.85 | AB071 | 35.19 |
| | (Seq. 2) | | | | (seq. 3) | | | |
| DVD522 | VEGF | N-term. | Long | Long | DLL4 | 23.53 | AB071 | 35.19 |
| | (Seq. 2) | | | | (seq. 3) | | | |
| DVD527 | VEGF | C-term. | Long | Short | DLL4 | 2380.25 | AB071 | 52.97 |
| | (Seq. 2) | | | | (seq. 3) | | | |
| DVD528 | VEGF | N-term. | Long | Short | DLL4 | 27.69 | AB071 | 52.97 |
| | (Seq. 2) | | | | (seq. 3) | | | |
| DVD533 | VEGF | C-term. | Short | Long | DLL4 | 1260.61 | AB071 | 52.97 |
| | (Seq. 2) | | | | (seq. 3) | | | |
| DVD534 | VEGF | N-term. | Short | Long | DLL4 | 23.61 | AB071 | 52.97 |
| | (Seq. 2) | | | | (seq. 3) | | | |
| DVD513 | VEGF | C-term. | Short | Short | DLL4 | 58.54 | AB070 | 0.97 |
| | (Seq. 3) | | | | (seq. 3) | | | |
| DVD514 | VEGF | N-term. | Short | Short | DLL4 | 67.41 | AB070 | 0.97 |
| | (Seq. 3) | | | | (seq. 3) | | | |
| DVD519 | VEGF | C-term. | Long | Long | DLL4 | 77.17 | AB070 | 0.97 |
| | (Seq. 3) | | | | (seq. 3) | | | |
| DVD520 | VEGF | N-term. | Long | Long | DLL4 | 247.74 | AB070 | 0.97 |
| | (Seq. 3) | | | | (seq. 3) | | | |
| DVD525 | VEGF | C-term. | Long | Short | DLL4 | 21.79 | AB070 | 1.42 |
| | (Seq. 3) | | | | (seq. 3) | | | |
| DVD526 | VEGF | N-term. | Long | Short | DLL4 | 96.22 | AB070 | 1.42 |
| | (Seq. 3) | | | | (seq. 3) | | | |
| DVD531 | VEGF | C-term. | Short | Long | DLL4 | 60.39 | AB070 | 1.42 |
| | (Seq. 3) | | | | (seq. 3) | | | |
| DVD532 | VEGF | N-term. | Short | Long | DLL4 | 28.91 | AB070 | 1.42 |
| | (Seq. 3) | | | | (seq. 3) | | | |
| DVD487 | VEGF | C-term. | Short | Short | DLL4 | 39.78 | AB014 | 1.61 |
| | (Seq. 1) | | | | (seq. 4) | | | |
| DVD488 | VEGF | N-term. | Short | Short | DLL4 | 4.98 | AB014 | 1.61 |
| | (Seq. 1) | | | | (seq. 4) | | | |
| DVD493 | VEGF | C-term. | Long | Long | DLL4 | 2.26 | AB014 | 1.61 |
| | (Seq. 1) | | | | (seq. 4) | | | |
| DVD494 | VEGF | N-term. | Long | Long | DLL4 | 712.21 | AB014 | 1.61 |
| | (Seq. 1) | | | | (seq. 4) | | | |
| DVD499 | VEGF | C-term. | Long | Short | DLL4 | 5.07 | AB014 | 1.41 |
| | (Seq. 1) | | | | (seq. 4) | | | |
| DVD500 | VEGF | N-term. | Long | Short | DLL4 | 5.28 | AB014 | 1.41 |
| | (Seq. 1) | | | | (seq. 4) | | | |
| DVD505 | VEGF | C-term. | Short | Long | DLL4 | 1.27 | AB014 | 1.41 |
| | (Seq. 1) | | | | (seq. 4) | | | |
| DVD506 | VEGF | N-term. | Short | Long | DLL4 | 1.84 | AB014 | 1.41 |
| | (Seq. 1) | | | | (seq. 4) | | | |
| DVD491 | VEGF | C-term. | Short | Short | DLL4 | 1249.97 | AB071 | 45.67 |
| | (Seq. 2) | | | | (seq. 4) | | | |
| DVD492 | VEGF | N-term. | Short | Short | DLL4 | 8.42 | AB071 | 45.67 |
| | (Seq. 2) | | | | (seq. 4) | | | |
| DVD497 | VEGF | C-term. | Long | Long | DLL4 | 858.21 | AB071 | 45.67 |
| | (Seq. 2) | | | | (seq. 4) | | | |
| DVD498 | VEGF | N-term. | Long | Long | DLL4 | 30.61 | AB071 | 45.67 |
| | (Seq. 2) | | | | (seq. 4) | | | |
| DVD503 | VEGF | C-term. | Long | Short | DLL4 | 429.96 | AB071 | 37.84 |
| | (Seq. 2) | | | | (seq. 4) | | | |
| DVD504 | VEGF | N-term. | Long | Short | DLL4 | 16.74 | AB071 | 37.84 |
| | (Seq. 2) | | | | (seq. 4) | | | |
| DVD509 | VEGF | C-term. | Short | Long | DLL4 | 121.28 | AB071 | 37.84 |
| | (Seq. 2) | | | | (seq. 4) | | | |
| DVD510 | VEGF | N-term. | Short | Long | DLL4 | 23.89 | AB071 | 37.84 |
| | (Seq. 2) | | | | (seq. 4) | | | |
| DVD489 | VEGF | C-term. | Short | Short | DLL4 | 180.95 | AB070 | 2.80 |
| | (Seq. 3) | | | | (seq. 4) | | | |
| DVD490 | VEGF | N-term. | Short | Short | DLL4 | 6.70 | AB070 | 2.80 |
| | (Seq. 3) | | | | (seq. 4) | | | |
| DVD495 | VEGF | C-term. | Long | Long | DLL4 | 69.95 | AB070 | 2.80 |
| | (Seq. 3) | | | | (seq. 4) | | | |
| DVD496 | VEGF | N-term. | Long | Long | DLL4 | 107.87 | AB070 | 2.80 |
| | (Seq. 3) | | | | (seq. 4) | | | |
| DVD501 | VEGF | C-term. | Long | Short | DLL4 | 45.16 | AB070 | 2.44 |
| | (Seq. 3) | | | | (seq. 4) | | | |
| DVD502 | VEGF | N-term. | Long | Short | DLL4 | 3.25 | AB070 | 2.44 |
| | (Seq. 3) | | | | (seq. 4) | | | |
| DVD507 | VEGF | C-term. | Short | Long | DLL4 | 34.85 | AB070 | 2.44 |
| | (Seq. 3) | | | | (seq. 4) | | | |
| DVD508 | VEGF | N-term. | Short | Long | DLL4 | 7.88 | AB070 | 2.44 |
| | (Seq. 3) | | | | (seq. 4) | | | |

[0613] Binding of all DVD-Ig constructs to VEGF was maintained and comparable to that of parent antibodies. All N-terminal variable domains bound with a similar high affinity as the parent antibody. Some specific combinations of linker length in the heavy chain and light chain improved the binding affinity of the C-terminal domains comparable to the parent antibody. Specifically there is a statistically significant (p=0.019) improvement in affinity of the C-terminal domain with a long linker rather than a short linker in the light chain.

TABLE 6

Direct Bind ELISA Of 96 DVD-Ig Constructs With Various DLL4 Sequences,
Orientations And Linker Length Combinations To DLL

| | | | | | | | | |
|---|---|---|---|---|---|---|---|---|
| | | | | | | DVD- | | |
| | | | | | Other | Ig | | Ref. Ab |
| | | | | | DVD-Ig | DLL4 | | DLL4 |
| DVD- | | | HC | LC | Variable | EC50 | Ref. | EC50 |
| Ig ID | Sequence ID | Orientation | linker | linker | Domain | (nM) | Ab. ID | (nM) |

| | | | | | | | | |
|---|---|---|---|---|---|---|---|---|
| DVD043 | DLL4 (Seq. 1) | C-term. | Short | Short | VEGF | 0.67 | AB015 | 1.39 |
| | | | | | (Seq. 1) | | | |
| DVD044 | DLL4 (Seq. 1) | N-term. | Short | Short | VEGF | 0.25 | AB015 | 1.39 |
| | | | | | (Seq. 1) | | | |
| DVD469 | DLL4 (Seq. 1) | N-term. | Long | Long | VEGF | 2.78 | AB015 | 1.39 |
| | | | | | (Seq. 1) | | | |
| DVD470 | DLL4 (Seq. 1) | C-term. | Long | Long | VEGF | 0.19 | AB015 | 1.39 |
| | | | | | (Seq. 1) | | | |
| DVD475 | DLL4 (Seq. 1) | N-term. | Long | Short | VEGF | 0.23 | AB015 | 1.23 |
| | | | | | (Seq. 1) | | | |
| DVD476 | DLL4 (Seq. 1) | C-term. | Long | Short | VEGF | 0.30 | AB015 | 1.23 |
| | | | | | (Seq. 1) | | | |
| DVD481 | DLL4 (Seq. 1) | N-term. | Short | Long | VEGF | 3.30 | AB015 | 1.23 |
| | | | | | (Seq. 1) | | | |
| DVD482 | DLL4 (Seq. 1) | C-term. | Short | Long | VEGF | 0.36 | AB015 | 1.23 |
| | | | | | (Seq. 1) | | | |
| DVD441 | DLL4 (Seq. 4) | N-term. | Short | Short | VEGF | 0.04 | AB069 | 0.10 |
| | | | | | (Seq. 1) | | | |
| DVD442 | DLL4 (Seq. 4) | C-term. | Short | Short | VEGF | 10.55 | AB069 | 0.10 |
| | | | | | (Seq. 1) | | | |
| DVD447 | DLL4 (Seq. 4) | N-term. | Long | Long | VEGF | 0.12 | AB069 | 0.10 |
| | | | | | (Seq. 1) | | | |
| DVD448 | DLL4 (Seq. 4) | C-term. | Long | Long | VEGF | 0.41 | AB069 | 0.10 |
| | | | | | (Seq. 1) | | | |
| DVD453 | DLL4 (Seq. 4) | N-term. | Long | Short | VEGF | 0.09 | AB069 | 0.04 |
| | | | | | (Seq. 1) | | | |
| DVD454 | DLL4 (Seq. 4) | C-term. | Long | Short | VEGF | 1.01 | AB069 | 0.04 |
| | | | | | (Seq. 1) | | | |
| DVD459 | DLL4 (Seq. 4) | N-term. | Short | Long | VEGF | 0.26 | AB069 | 0.04 |
| | | | | | (Seq. 1) | | | |
| DVD460 | DLL4 (Seq. 4) | C-term. | Short | Long | VEGF | 0.64 | AB069 | 0.04 |
| | | | | | (Seq. 1) | | | |
| DVD511 | DLL4 (Seq. 2) | N-term. | Short | Short | VEGF | 0.10 | AB073 | 0.08 |
| | | | | | (Seq. 1) | | | |
| DVD512 | DLL4 (Seq. 2) | C-term. | Short | Short | VEGF | 1.71 | AB073 | 0.08 |
| | | | | | (Seq. 1) | | | |
| DVD517 | DLL4 (Seq. 2) | N-term. | Long | Long | VEGF | 0.10 | AB073 | 0.08 |
| | | | | | (Seq. 1) | | | |
| DVD518 | DLL4 (Seq. 2) | C-term. | Long | Long | VEGF | 5.90 | AB073 | 0.08 |
| | | | | | (Seq. 1) | | | |
| DVD523 | DLL4 (Seq. 2) | N-term. | Long | Short | VEGF | 0.09 | AB073 | 0.03 |
| | | | | | (Seq. 1) | | | |
| DVD524 | DLL4 (Seq. 2) | C-term. | Long | Short | VEGF | 0.22 | AB073 | 0.03 |
| | | | | | (Seq. 1) | | | |
| DVD529 | DLL4 (Seq. 2) | N-term. | Short | Long | VEGF | 0.10 | AB073 | 0.03 |
| | | | | | (Seq. 1) | | | |
| DVD530 | DLL4 (Seq. 2) | C-term. | Short | Long | VEGF | 0.22 | AB073 | 0.03 |
| | | | | | (Seq. 1) | | | |
| DVD487 | DLL4 (Seq. 3) | N-term. | Short | Short | VEGF | 0.14 | AB072 | 1.29 |
| | | | | | (Seq. 1) | | | |
| DVD488 | DLL4 (Seq. 3) | C-term. | Short | Short | VEGF | 1.84 | AB072 | 1.29 |
| | | | | | (Seq. 1) | | | |
| DVD493 | DLL4 (Seq. 3) | N-term. | Long | Long | VEGF | 0.06 | AB072 | 1.29 |
| | | | | | (Seq. 1) | | | |
| DVD494 | DLL4 (Seq. 3) | C-term. | Long | Long | VEGF | 39.48 | AB072 | 1.29 |
| | | | | | (Seq. 1) | | | |
| DVD499 | DLL4 (Seq. 3) | N-term. | Long | Short | VEGF | 0.09 | AB072 | 0.70 |
| | | | | | (Seq. 1) | | | |
| DVD500 | DLL4 (Seq. 3) | C-term. | Long | Short | VEGF | 0.57 | AB072 | 0.70 |
| | | | | | (Seq. 1) | | | |
| DVD505 | DLL4 (Seq. 3) | N-term. | Short | Long | VEGF | 0.09 | AB072 | 0.70 |
| | | | | | (Seq. 1) | | | |
| DVD506 | DLL4 (Seq. 3) | C-term. | Short | Long | VEGF | 0.32 | AB072 | 0.70 |
| | | | | | (Seq. 1) | | | |
| DVD467 | DLL4 (Seq. 1) | N-term. | Short | Short | VEGF | 0.54 | AB015 | 0.30 |
| | | | | | (Seq. 2) | | | |
| DVD468 | DLL4 (Seq. 1) | C-term. | Short | Short | VEGF | 2.28 | AB015 | 0.30 |
| | | | | | (Seq. 2) | | | |
| DVD473 | DLL4 (Seq. 1) | N-term. | Long | Long | VEGF | 1.80 | AB015 | 0.30 |
| | | | | | (Seq. 2) | | | |
| DVD474 | DLL4 (Seq. 1) | C-term. | Long | Long | VEGF | 0.57 | AB015 | 0.30 |
| | | | | | (Seq. 2) | | | |
| DVD479 | DLL4 (Seq. 1) | N-term. | Long | Short | VEGF | 1.69 | AB015 | 0.28 |
| | | | | | (Seq. 2) | | | |
| DVD480 | DLL4 (Seq. 1) | C-term. | Long | Short | VEGF | 0.60 | AB015 | 0.28 |
| | | | | | (Seq. 2) | | | |
| DVD485 | DLL4 (Seq. 1) | N-term. | Short | Long | VEGF | 1.41 | AB015 | 0.28 |
| | | | | | (Seq. 2) | | | |
| DVD486 | DLL4 (Seq. 1) | C-term. | Short | Long | VEGF | 0.59 | AB015 | 0.28 |
| | | | | | (Seq. 2) | | | |
| DVD445 | DLL4 (Seq. 4) | N-term. | Short | Short | VEGF | 0.17 | AB069 | 0.20 |
| | | | | | (Seq. 2) | | | |
| DVD446 | DLL4 (Seq. 4) | C-term. | Short | Short | VEGF | 13.92 | AB069 | 0.20 |
| | | | | | (Seq. 2) | | | |
| DVD451 | DLL4 (Seq. 4) | N-term. | Long | Long | VEGF | 0.40 | AB069 | 0.20 |
| | | | | | (Seq. 2) | | | |
| DVD452 | DLL4 (Seq. 4) | C-term. | Long | Long | VEGF | 0.34 | AB069 | 0.20 |
| | | | | | (Seq. 2) | | | |
| DVD457 | DLL4 (Seq. 4) | N-term. | Long | Short | VEGF | 0.13 | AB069 | 0.21 |
| | | | | | (Seq. 2) | | | |
| DVD458 | DLL4 (Seq. 4) | C-term. | Long | Short | VEGF | 1.54 | AB069 | 0.21 |
| | | | | | (Seq. 2) | | | |
| DVD463 | DLL4 (Seq. 4) | N-term. | Short | Long | VEGF | 0.50 | AB069 | 0.21 |
| | | | | | (Seq. 2) | | | |
| DVD464 | DLL4 (Seq. 4) | C-term. | Short | Long | VEGF | 0.80 | AB069 | 0.21 |
| | | | | | (Seq. 2) | | | |
| DVD515 | DLL4 (Seq. 2) | N-term. | Short | Short | VEGF | 0.20 | AB073 | 0.11 |
| | | | | | (Seq. 2) | | | |
| DVD516 | DLL4 (Seq. 2) | C-term. | Short | Short | VEGF | 4.33 | AB073 | 0.11 |
| | | | | | (Seq. 2) | | | |
| DVD521 | DLL4 (Seq. 2) | N-term. | Long | Long | VEGF | 0.26 | AB073 | 0.11 |
| | | | | | (Seq. 2) | | | |
| DVD522 | DLL4 (Seq. 2) | C-term. | Long | Long | VEGF | 0.48 | AB073 | 0.11 |
| | | | | | (Seq. 2) | | | |
| DVD527 | DLL4 (Seq. 2) | N-term. | Long | Short | VEGF | 0.20 | AB073 | 0.11 |
| | | | | | (Seq. 2) | | | |
| DVD528 | DLL4 (Seq. 2) | C-term. | Long | Short | VEGF | 0.81 | AB073 | 0.11 |
| | | | | | (Seq. 2) | | | |
| DVD533 | DLL4 (Seq. 2) | N-term. | Short | Long | VEGF | 0.25 | AB073 | 0.11 |
| | | | | | (Seq. 2) | | | |
| DVD534 | DLL4 (Seq. 2) | C-term. | Short | Long | VEGF | 0.47 | AB073 | 0.11 |
| | | | | | (Seq. 2) | | | |
| DVD491 | DLL4 (Seq. 3) | N-term. | Short | Short | VEGF | 0.39 | AB072 | 1.99 |
| | | | | | (Seq. 2) | | | |
| DVD492 | DLL4 (Seq. 3) | C-term. | Short | Short | VEGF | 1.77 | AB072 | 1.99 |
| | | | | | (Seq. 2) | | | |
| DVD497 | DLL4 (Seq. 3) | N-term. | Long | Long | VEGF | 0.53 | AB072 | 1.99 |
| | | | | | (Seq. 2) | | | |
| DVD498 | DLL4 (Seq. 3) | C-term. | Long | Long | VEGF | 0.45 | AB072 | 1.99 |
| | | | | | (Seq. 2) | | | |
| DVD503 | DLL4 (Seq. 3) | N-term. | Long | Short | VEGF | 0.33 | AB072 | 1.85 |
| | | | | | (Seq. 2) | | | |
| DVD504 | DLL4 (Seq. 3) | C-term. | Long | Short | VEGF | 0.53 | AB072 | 1.85 |
| | | | | | (Seq. 2) | | | |
| DVD509 | DLL4 (Seq. 3) | N-term. | Short | Long | VEGF | 0.21 | AB072 | 1.85 |
| | | | | | (Seq. 2) | | | |
| DVD510 | DLL4 (Seq. 3) | C-term. | Short | Long | VEGF | 0.42 | AB072 | 1.85 |
| | | | | | (Seq. 2) | | | |
| DVD465 | DLL4 (Seq. 1) | N-term. | Short | Short | VEGF | 0.57 | AB015 | 0.60 |
| | | | | | (Seq. 3) | | | |
| DVD466 | DLL4 (Seq. 1) | C-term. | Short | Short | VEGF | 19.84 | AB015 | 0.60 |
| | | | | | (Seq. 3) | | | |
| DVD471 | DLL4 (Seq. 1) | N-term. | Long | Long | VEGF | 0.89 | AB015 | 0.60 |
| | | | | | (Seq. 3) | | | |
| DVD472 | DLL4 (Seq. 1) | C-term. | Long | Long | VEGF | 2.78 | AB015 | 0.60 |
| | | | | | (Seq. 3) | | | |
| DVD477 | DLL4 (Seq. 1) | N-term. | Long | Short | VEGF | 0.69 | AB015 | 0.58 |
| | | | | | (Seq. 3) | | | |
| DVD478 | DLL4 (Seq. 1) | C-term. | Long | Short | VEGF | 2.53 | AB015 | 0.58 |
| | | | | | (Seq. 3) | | | |
| DVD483 | DLL4 (Seq. 1) | N-term. | Short | Long | VEGF | 0.63 | AB015 | 0.58 |
| | | | | | (Seq. 3) | | | |
| DVD484 | DLL4 (Seq. 1) | C-term. | Short | Long | VEGF | 1.75 | AB015 | 0.58 |
| | | | | | (Seq. 3) | | | |
| DVD443 | DLL4 (Seq. 4) | N-term. | Short | Short | VEGF | 0.20 | AB069 | 0.23 |
| | | | | | (Seq. 3) | | | |
| DVD444 | DLL4 (Seq. 4) | C-term. | Short | Short | VEGF | 30.54 | AB069 | 0.23 |
| | | | | | (Seq. 3) | | | |
| DVD449 | DLL4 (Seq. 4) | N-term. | Long | Long | VEGF | 0.36 | AB069 | 0.23 |
| | | | | | (Seq. 3) | | | |
| DVD450 | DLL4 (Seq. 4) | C-term. | Long | Long | VEGF | 1.99 | AB069 | 0.23 |
| | | | | | (Seq. 3) | | | |
| DVD455 | DLL4 (Seq. 4) | N-term. | Long | Short | VEGF | 0.24 | AB069 | 0.24 |
| | | | | | (Seq. 3) | | | |
| DVD456 | DLL4 (Seq. 4) | C-term. | Long | Short | VEGF | 2.48 | AB069 | 0.24 |
| | | | | | (Seq. 3) | | | |
| DVD461 | DLL4 (Seq. 4) | N-term. | Short | Long | VEGF | 0.52 | AB069 | 0.24 |
| | | | | | (Seq. 3) | | | |
| DVD462 | DLL4 (Seq. 4) | C-term. | Short | Long | VEGF | 7.99 | AB069 | 0.24 |
| | | | | | (Seq. 3) | | | |
| DVD513 | DLL4 (Seq. 2) | N-term. | Short | Short | VEGF | 0.66 | AB073 | 0.22 |
| | | | | | (Seq. 3) | | | |
| DVD514 | DLL4 (Seq. 2) | C-term. | Short | Short | VEGF | 21.05 | AB073 | 0.22 |
| | | | | | (Seq. 3) | | | |
| DVD519 | DLL4 (Seq. 2) | N-term. | Long | Long | VEGF | 1.53 | AB073 | 0.22 |
| | | | | | (Seq. 3) | | | |
| DVD520 | DLL4 (Seq. 2) | C-term. | Long | Long | VEGF | 17.34 | AB073 | 0.22 |
| | | | | | (Seq. 3) | | | |
| DVD525 | DLL4 (Seq. 2) | N-term. | Long | Short | VEGF | 1.00 | AB073 | 0.21 |
| | | | | | (Seq. 3) | | | |
| DVD526 | DLL4 (Seq. 2) | C-term. | Long | Short | VEGF | 1.57 | AB073 | 0.21 |
| | | | | | (Seq. 3) | | | |
| DVD531 | DLL4 (Seq. 2) | N-term. | Short | Long | VEGF | 0.57 | AB073 | 0.21 |
| | | | | | (Seq. 3) | | | |
| DVD532 | DLL4 (Seq. 2) | C-term. | Short | Long | VEGF | 1.43 | AB073 | 0.21 |
| | | | | | (Seq. 3) | | | |
| DVD489 | DLL4 (Seq. 3) | N-term. | Short | Short | VEGF | 0.62 | AB072 | 63.43 |
| | | | | | (Seq. 3) | | | |
| DVD490 | DLL4 (Seq. 3) | C-term. | Short | Short | VEGF | 9.27 | AB072 | 63.43 |
| | | | | | (Seq. 3) | | | |
| DVD495 | DLL4 (Seq. 3) | N-term. | Long | Long | VEGF | 0.33 | AB072 | 63.43 |
| | | | | | (Seq. 3) | | | |
| DVD496 | DLL4 (Seq. 3) | C-term. | Long | Long | VEGF | 5.59 | AB072 | 63.43 |
| | | | | | (Seq. 3) | | | |
| DVD501 | DLL4 (Seq. 3) | N-term. | Long | Short | VEGF | 0.18 | AB072 | 63.24 |
| | | | | | (Seq. 3) | | | |
| DVD502 | DLL4 (Seq. 3) | C-term. | Long | Short | VEGF | 3.17 | AB072 | 63.24 |
| | | | | | (Seq. 3) | | | |
| DVD507 | DLL4 (Seq. 3) | N-term. | Short | Long | VEGF | 0.71 | AB072 | 63.24 |
| | | | | | (Seq. 3) | | | |
| DVD508 | DLL4 (Seq. 3) | C-term. | Short | Long | VEGF | 0.61 | AB072 | 63.24 |
| | | | | | (Seq. 3) | | | |

[0614] Binding of all DVD-Ig constructs to DLL4 was maintained and comparable to that of parent antibodies. All N-terminal variable domains bound with a similar high affinity as the parent antibody. Some specific combinations of linker length in the heavy chain and light chain improved the binding affinity of the C-terminal domains comparable to the parent antibody. Specifically there is a trend for improvement in the affinity of the C-terminal domain with a long linker in the light chain and/or heavy chain rather than a short linker in both the light and heavy chain.

TABLE 7
RON And EGFR Direct Bind ELISA Of 8 DVD Constructs With
Various Orientations And Linker Length Combinations

| | | | | | | | | | | C- |
|---|---|---|---|---|---|---|---|---|---|---|
| | | N- | | N- | | | C- | C- | | Term. |
| | N-Term. | Term. | | Term. | | | Term. | Term. | | Ref. |
| | VD | VD | N-Term. | Ref. | | | VD | VD | C-Term. | Ab. |
| DVD-Ig | Sequence | EC50 | Ref. Ab. | Ab. EC50 | HC | LC | Sequence | EC50 | Ref. Ab. | EC50 |
| ID | ID | (nM) | ID | (nM) | linker | linker | ID | (nM) | ID | (nM) |
| DVD023 | EGFR | 0.23 | AB033 | 0.66 | short | short | RON | 40.18 | AB005 | 0.26 |
| DVD024 | RON | 0.54 | AB005 | 0.26 | short | short | EGFR | 1.87 | AB033 | 0.66 |
| DVD535 | RON | 0.43 | AB005 | 0.69 | long | long | EGFR | 1.7 | AB033 | 1.17 |
| DVD536 | EGFR | 1 | AB033 | 1.17 | long | long | RON | 10.57 | AB005 | 0.69 |
| DVD537 | RON | 0.32 | AB005 | 0.69 | long | short | EGFR | 0.94 | AB033 | 1.17 |
| DVD538 | EGFR | 1.17 | AB033 | 1.17 | long | short | RON | 31.11 | AB005 | 0.69 |
| DVD539 | RON | 0.4 | AB005 | 0.69 | short | long | EGFR | 1.38 | AB033 | 1.17 |
| DVD540 | EGFR | 1.1 | AB033 | 1.17 | short | long | RON | 12.99 | AB005 | 0.69 |

TABLE 8
EGFR. HER2 (ErbB2) And ErbB3 Direct Bind ELISA Of 44 DVD Constructs
With Various Sequences, Orientations And Linker Length Combinations

| | | | | | | | | | | C- |
|---|---|---|---|---|---|---|---|---|---|---|
| | N- | | | | | | | C- | | Term. |
| | Term. | N-Term. | N- | N-Term. | | | C-Term. | Term. | | Ref. |
| | VD | VD | Term. | Ref. Ab. | | | VD | VD | C-Term. | Ab. |
| DVD-Ig | Sequence | EC50 | Ref. | EC50 | HC | LC | Sequence | EC50 | Ref. Ab. | EC50 |
| ID | ID | (nM) | Ab. ID | (nM) | linker | linker | ID | (nM) | ID | (nM) |
| DVD385 | ErbB3 | 1.72 | AB062 | 0.75 | Long | Long | EGFR | 2.79 | AB033 | 0.46 |
| DVD386 | EGFR | 0.56 | AB033 | 0.46 | Long | Long | ErbB3 | 4.01 | AB062 | 0.75 |
| DVD387 | ErbB3 | 1.18 | AB062 | 0.75 | Long | Long | HER-2 | 4.23 | AB004 | 2.37 |
| DVD388 | HER-2 | 1.65 | AB004 | 2.37 | Long | Long | ErbB3 | 3.40 | AB062 | 0.75 |
| DVD389 | ErbB3 | 1.25 | AB062 | 0.75 | Long | Short | EGFR | 2.3 | AB033 | 0.46 |
| DVD390 | EGFR | 0.36 | AB033 | 0.46 | Long | Short | ErbB3 | 11.21 | AB062 | 0.75 |
| DVD391 | ErbB3 | 4.06 | AB062 | 0.97 | Long | Short | HER-2 | 25.26 | AB004 | 2.37 |
| DVD392 | HER-2 | 1.85 | AB004 | 2.37 | Long | Short | ErbB3 | 16.26 | AB062 | 0.97 |
| DVD393 | ErbB3 | 1.39 | AB062 | 0.97 | Short | Long | EGFR | 1.75 | AB033 | 0.46 |
| DVD394 | EGFR | 0.56 | AB033 | 0.46 | Short | Long | ErbB3 | 21.75 | AB062 | 0.97 |
| DVD395 | ErbB3 | 1.58 | AB062 | 0.97 | Short | Long | HER-2 | 5.98 | AB004 | 2.37 |
| DVD396 | HER-2 | 2.87 | AB004 | 2.37 | Short | Long | ErbB3 | 24.75 | AB062 | 0.97 |
| DVD397 | ErbB3 | 1.05 | AB063 | 0.87 | Long | Long | EGFR | 1.41 | AB033 | 0.49 |
| DVD398 | EGFR | 0.43 | AB033 | 0.49 | Long | Long | ErbB3 | 1.39 | AB063 | 0.87 |
| DVD399 | ErbB3 | 599.0 | AB063 | 0.87 | Long | Long | HER-2 | 1102.54 | AB004 | 2.67 |
| DVD400 | HER-2 | 3.57 | AB004 | 2.67 | Long | Long | ErbB3 | 7.74 | AB063 | 0.87 |
| DVD401 | ErbB3 | 0.79 | AB063 | 0.87 | Long | Short | EGFR | 1.65 | AB033 | 0.49 |
| DVD402 | EGFR | 0.65 | AB033 | 0.49 | Long | Short | ErbB3 | 0.13 | AB063 | 0.87 |
| DVD403 | ErbB3 | 1.03 | AB063 | 0.92 | Long | Short | HER-2 | 13.82 | AB004 | 2.67 |
| DVD404 | HER-2 | 1.25 | AB004 | 2.67 | Long | Short | ErbB3 | 4.34 | AB063 | 0.92 |
| DVD405 | ErbB3 | 1.08 | AB063 | 0.92 | Short | Long | EGFR | 1.68 | AB033 | 0.49 |
| DVD406 | EGFR | 0.60 | AB033 | 0.49 | Short | Long | ErbB3 | 1.11 | AB063 | 0.92 |
| DVD407 | ErbB3 | 2.98 | AB063 | 0.92 | Short | Long | HER-2 | 28.51 | AB004 | 2.67 |
| DVD408 | HER-2 | 2.61 | AB004 | 2.67 | Short | Long | ErbB3 | 4.37 | AB063 | 0.92 |
| DVD409 | ErbB3 | 3.60 | AB067 | 1.78 | Short | Short | EGFR | 1.75 | AB033 | 0.48 |
| DVD410 | EGFR | 0.36 | AB033 | 0.59 | Short | Short | ErbB3 | 55.38 | AB067 | 2.20 |
| DVD411 | ErbB3 | 4.92 | AB067 | 1.78 | Short | Short | HER-2 | 15.4 | AB004 | 1.19 |
| DVD412 | HER-2 | 4.24 | AB004 | 1.52 | Short | Short | ErbB3 | 205.98 | AB067 | 2.20 |
| DVD413 | ErbB3 | 4.77 | AB067 | 1.12 | Long | Long | EGFR | 1.1 | AB033 | 0.48 |
| DVD414 | EGFR | 0.49 | AB033 | 0.59 | Long | Long | ErbB3 | 21.27 | AB067 | 2.20 |
| DVD415 | ErbB3 | 12.96 | AB067 | 2.20 | Long | Long | HER-2 | 1.56 | AB004 | 1.19 |
| DVD416 | HER-2 | 3.58 | AB004 | 1.52 | Long | Long | ErbB3 | 64.36 | AB067 | 2.20 |
| DVD417 | ErbB3 | 6.56 | AB067 | 1.12 | Long | Short | EGFR | 1.62 | AB033 | 0.48 |
| DVD418 | EGFR | 0.46 | AB033 | 0.59 | Long | Short | ErbB3 | 18.20 | AB067 | 2.20 |
| DVD419 | ErbB3 | 32.37 | AB067 | 2.20 | Long | Short | HER-2 | 4.78 | AB004 | 1.19 |
| DVD420 | HER-2 | 3.58 | AB004 | 1.52 | Long | Short | ErbB3 | 143.66 | AB067 | 1.78 |
| DVD421 | ErbB3 | 5.10 | AB067 | 1.12 | Short | Long | EGFR | 1.1 | AB033 | 0.45 |
| DVD422 | EGFR | 0.48 | AB033 | 0.59 | Short | Long | ErbB3 | 17.97 | AB067 | 1.78 |
| DVD423 | ErbB3 | 4.69 | AB067 | 1.12 | Short | Long | HER-2 | 1.29 | AB004 | 1.19 |
| DVD424 | HER-2 | 4.47 | AB004 | 1.52 | Short | Long | ErbB3 | 40.69 | AB067 | 1.78 |
| DVD683 | ErbB3 | 0.58 | AB062 | 1.60 | Short | Short | HER-2 | 35.64 | AB004 | 2.22 |
| DVD684 | HER-2 | 0.93 | AB004 | 2.22 | Short | Short | ErbB3 | 215.63 | AB062 | 1.60 |
| DVD685 | ErbB3 | 0.48 | AB063 | 1.10 | Short | Short | HER-2 | 29.02 | AB004 | 2.22 |
| DVD686 | HER-2 | 1.25 | AB004 | 2.22 | Short | Short | ErbB3 | 97.39 | AB063 | 1.10 |

TABLE 9
PLGF, HER-2 & VEGF Direct Bind ELISA Of 62 DVD Constructs With
Various Sequences, Orientations And Linker Length Combinations

| | N- | N- | | | | | | C- | | |
|---|---|---|---|---|---|---|---|---|---|---|
| | Term. | Term. | N- | N-Term. | | | C-Term. | Term. | | C-Term. |
| | VD | VD | Term. | Ref. | | | VD | VD | C-Term. | Ref. Ab. |
| DVD-Ig | Sequence | EC50 | Ref. | Ab. EC50 | HC | LC | Sequence | EC50 | Ref. Ab. | EC50 |
| ID | ID | (nM) | Ab. ID | (nM) | linker | linker | ID | (nM) | ID | (nM) |
| DVD541 | PlGF | 0.08 | AB074 | 0.49 | short | short | VEGF | 64.44 | AB014 | 1.40 |
| DVD542 | VEGF | 0.80 | AB014 | 1.40 | short | short | PlGF | 13.04 | AB074 | 0.49 |
| DVD543 | PlGF | 0.14 | AB074 | 0.49 | short | short | VEGF | 1120.78 | AB070 | 2.35 |
| DVD544 | VEGF | 2.35 | AB070 | 2.35 | short | short | PlGF | 13.76 | AB074 | 0.49 |
| DVD545 | PlGF | 98.78 | AB074 | 0.49 | short | short | VEGF | >1000 | AB071 | 35.38 |
| DVD546 | VEGF | 25.8 | AB071 | 35.38 | short | short | PlGF | 7.03 | AB074 | 0.49 |
| DVD547 | PlGF | 0.14 | AB074 | 0.49 | short | short | HER-2 | 167.82 | AB004 | 1.3 |
| DVD548 | HER-2 | 1.26 | AB004 | 1.3 | short | short | PlGF | 7.42 | AB074 | 0.49 |
| DVD549 | PlGF | 265.03 | AB074 | 0.49 | long | long | VEGF | >1000 | AB014 | 1.40 |
| DVD550 | VEGF | >1000 | AB014 | 1.40 | long | long | PlGF | 145.70 | AB074 | 0.49 |
| DVD551 | PlGF | 96.98 | AB074 | 0.49 | long | long | VEGF | 1589.29 | AB070 | 2.35 |
| DVD552 | VEGF | 313.54 | AB070 | 2.35 | long | long | PlGF | 8.54 | AB074 | 0.49 |
| DVD553 | PlGF | 66317.52 | AB074 | 0.49 | long | long | VEGF | >1000 | AB071 | 35.38 |
| DVD554 | VEGF | 15.22 | AB071 | 35.38 | long | long | PlGF | 0.45 | AB074 | 0.49 |
| DVD555 | PlGF | N/B | AB074 | 0.49 | long | long | HER-2 | 963.06 | AB004 | 1.3 |
| DVD556 | HER-2 | 1.03 | AB004 | 1.3 | long | long | PlGF | 0.24 | AB074 | 0.49 |
| DVD557 | PlGF | 0.17 | AB074 | 0.49 | long | short | VEGF | 24.98 | AB014 | 1.40 |
| DVD558 | VEGF | 1.96 | AB014 | 1.40 | long | short | PlGF | 3.37 | AB074 | 0.49 |
| DVD559 | PlGF | 0.13 | AB074 | 0.49 | long | short | VEGF | 39.2 | AB070 | 2.35 |
| DVD560 | VEGF | 3.12 | AB070 | 2.35 | long | short | PlGF | 2.53 | AB074 | 0.49 |
| DVD561 | PlGF | 1.04 | AB074 | 0.49 | long | short | VEGF | 241.04 | AB071 | 35.38 |
| DVD562 | VEGF | 17.69 | AB071 | 35.38 | long | short | PlGF | 1.12 | AB074 | 0.49 |
| DVD563 | PlGF | 0.21 | AB074 | 0.49 | long | short | HER-2 | 16.8 | AB004 | 1.3 |
| DVD564 | HER-2 | 0.57 | AB004 | 1.3 | long | short | PlGF | 1.37 | AB074 | 0.49 |
| DVD565 | PlGF | 3.24 | AB074 | 0.49 | short | long | VEGF | 498.31 | AB014 | 1.40 |
| DVD566 | VEGF | 1.49 | AB014 | 1.40 | short | long | PlGF | 1.42 | AB074 | 0.49 |
| DVD567 | PlGF | 340.25 | AB074 | 0.49 | short | long | VEGF | >1000 | AB070 | 1.68 |
| DVD568 | VEGF | 3.14 | AB070 | 1.68 | short | long | PlGF | 2.84 | AB074 | 0.49 |
| DVD569 | PlGF | 88.47 | AB074 | 0.49 | short | long | VEGF | >1000 | AB071 | 26.56 |
| DVD570 | VEGF | 17.59 | AB071 | 26.56 | short | long | PlGF | 1.44 | AB074 | 0.49 |
| DVD571 | PlGF | 33.1 | AB074 | 0.49 | short | long | HER-2 | 209.28 | AB004 | 1.89 |
| DVD572 | HER-2 | 1.34 | AB004 | 1.89 | short | long | PlGF | 2.34 | AB074 | 0.49 |
| DVD573 | PlGF | 0.14 | AB047 | 0.14 | short | short | VEGF | >1000 | AB070 | 1.68 |
| DVD574 | VEGF | 11.72 | AB070 | 1.68 | short | short | PlGF | 7.04 | AB047 | 0.14 |
| DVD575 | PlGF | 0.14 | AB047 | 0.14 | short | short | VEGF | >1000 | AB071 | 26.56 |
| DVD576 | VEGF | 16.22 | AB071 | 26.56 | short | short | PlGF | 1.82 | AB047 | 0.14 |
| DVD577 | PlGF | 0.15 | AB047 | 0.14 | short | short | HER-2 | 335.83 | AB004 | 1.89 |
| DVD578 | HER-2 | 1.28 | AB004 | 1.89 | short | short | PlGF | 1.21 | AB047 | 0.14 |
| DVD579 | PlGF | 1.18 | AB047 | 0.17 | long | long | VEGF | 47.94 | AB014 | 1.40 |
| DVD580 | VEGF | >1000 | AB014 | 1.40 | long | long | PlGF | 34.14 | AB047 | 0.17 |
| DVD581 | PlGF | 0.39 | AB047 | 0.17 | long | long | VEGF | 35.9 | AB070 | 1.68 |
| DVD582 | VEGF | 4.36 | AB070 | 1.68 | long | long | PlGF | 0.37 | AB047 | 0.17 |
| DVD583 | PlGF | 0.32 | AB047 | 0.17 | long | long | VEGF | 559.56 | AB071 | 26.56 |
| DVD584 | VEGF | 18.36 | AB071 | 26.56 | long | long | PlGF | 0.32 | AB047 | 0.17 |
| DVD585 | PlGF | 0.26 | AB047 | 0.13 | long | long | HER-2 | 5.44 | AB004 | 1.89 |
| DVD586 | HER-2 | 1.04 | AB004 | 1.89 | long | long | PlGF | 0.18 | AB047 | 0.13 |
| DVD587 | PlGF | 0.13 | AB047 | 0.13 | long | short | VEGF | 12.71 | AB014 | 1.40 |
| DVD588 | VEGF | 4.1 | AB014 | 1.40 | long | short | PlGF | 1.84 | AB047 | 0.13 |
| DVD589 | PlGF | 0.12 | AB047 | 0.13 | long | short | VEGF | 1356.24 | AB070 | 1.9 |
| DVD590 | VEGF | 21.09 | AB070 | 1.9 | long | short | PlGF | 2.78 | AB047 | 0.13 |
| DVD591 | PlGF | 0.13 | AB047 | 0.14 | long | short | VEGF | 1166.31 | AB071 | 20.92 |
| DVD592 | VEGF | 19.21 | AB071 | 20.92 | long | short | PlGF | 0.31 | AB047 | 0.14 |
| DVD593 | PlGF | 0.09 | AB047 | 0.14 | long | short | HER-2 | 17.53 | AB004 | 1.78 |
| DVD594 | HER-2 | 1.03 | AB004 | 1.78 | long | short | PlGF | 0.38 | AB047 | 0.14 |
| DVD595 | PlGF | 0.21 | AB047 | 0.14 | short | long | VEGF | 4.63 | AB014 | 1.40 |
| DVD596 | VEGF | 12.73 | AB014 | 1.40 | short | long | PlGF | 14.59 | AB047 | 0.14 |
| DVD597 | PlGF | 0.17 | AB047 | 0.13 | short | long | VEGF | 31.08 | AB070 | 1.9 |
| DVD598 | VEGF | 6.66 | AB070 | 1.9 | short | long | PlGF | 0.66 | AB047 | 0.13 |
| DVD599 | PlGF | 0.23 | AB047 | 0.13 | short | long | VEGF | 664.22 | AB071 | 20.92 |
| DVD600 | VEGF | 17.04 | AB071 | 20.92 | short | long | PlGF | 0.4 | AB047 | 0.13 |
| DVD601 | PlGF | 0.24 | AB047 | 0.13 | short | long | HER-2 | 10.03 | AB004 | 1.78 |
| DVD602 | HER-2 | 1.12 | AB004 | 1.78 | short | long | PlGF | 0.31 | AB047 | 0.13 |

TABLE 10
HGF & VEGF Direct Bind ELISA Of 46 DVD Constructs With Various
Sequences, Orientations And Linker Length Combinations

| | | | | N- | | | | | | C- |
|---|---|---|---|---|---|---|---|---|---|---|
| | | | | Term. | | | | C- | | Term. |
| | N-Term. | N-Term. | | Ref. | | | C-Term. | Term. | | Ref. |
| | VD | VD | N-Term. | Ab. | | | VD | VD | C-Term. | Ab. |
| DVD-Ig | Sequence | EC50 | Ref. Ab. | EC50 | HC | LC | Sequence | EC50 | Ref. Ab. | EC50 |
| ID | ID | (nM) | ID | (nM) | linker | linker | ID | (nM) | ID | (nM) |
| DVD641 | HGF | 0.47 | AB012 | 0.15 | long | long | VEGF | 41.55 | AB014 | 1.40 |
| DVD642 | VEGF | 6.35 | AB014 | 1.40 | long | long | HGF | 0.87 | AB012 | 0.15 |
| DVD643 | HGF | 0.26 | AB012 | 0.15 | long | long | VEGF | 175.3 | AB070 | 5.22 |
| DVD644 | VEGF | 5.31 | AB070 | 5.22 | long | long | HGF | 0.29 | AB012 | 0.15 |
| DVD645 | HGF | 0.17 | AB012 | 0.15 | long | long | VEGF | >10000 | AB071 | 40.35 |
| DVD646 | VEGF | 30.74 | AB071 | 40.35 | long | long | HGF | 0.49 | AB012 | 0.15 |
| DVD647 | HGF | 0.15 | AB012 | 0.17 | long | short | VEGF | 25.45 | AB014 | 1.40 |
| DVD648 | VEGF | 1.72 | AB014 | 1.40 | long | short | HGF | 4.17 | AB012 | 0.17 |
| DVD649 | HGF | 0.15 | AB012 | 0.17 | long | short | VEGF | 185.88 | AB070 | 5.22 |
| DVD650 | VEGF | 2.67 | AB070 | 5.22 | long | short | HGF | 4.63 | AB012 | 0.17 |
| DVD651 | HGF | 0.11 | AB012 | 0.17 | long | short | VEGF | 340.64 | AB071 | 40.35 |
| DVD652 | VEGF | 13.83 | AB071 | 40.35 | long | short | HGF | 4.71 | AB012 | 0.17 |
| DVD653 | HGF | 0.24 | AB012 | 0.17 | short | long | VEGF | 16.77 | AB014 | 1.40 |
| DVD654 | VEGF | 3.71 | AB014 | 1.40 | short | long | HGF | 0.91 | AB012 | 0.17 |
| DVD655 | HGF | 0.19 | AB012 | 0.17 | short | long | VEGF | 92.93 | AB070 | 5.22 |
| DVD656 | VEGF | 7.87 | AB070 | 5.22 | short | long | HGF | 1.27 | AB012 | 0.17 |
| DVD657 | HGF | 0.31 | AB012 | 0.17 | short | long | VEGF | 357.93 | AB071 | 40.35 |
| DVD658 | VEGF | 28.66 | AB071 | 40.35 | short | long | HGF | 0.94 | AB012 | 0.17 |
| DVD659 | HGF | 0.4 | AB079 | 0.48 | short | short | VEGF | 161.03 | AB014 | 1.40 |
| DVD660 | VEGF | 1.51 | AB014 | 1.40 | short | short | HGF | 449.24 | AB079 | 0.48 |
| DVD661 | HGF | 0.7 | AB079 | 0.48 | short | short | VEGF | 566.36 | AB070 | 4.64 |
| DVD662 | VEGF | 70.17 | AB070 | 4.64 | short | short | HGF | 213.76 | AB079 | 0.48 |
| DVD663 | HGF | 0.26 | AB079 | 0.48 | short | short | VEGF | >10000 | AB071 | 80.43 |
| DVD664 | VEGF | 40.91 | AB071 | 80.43 | short | short | HGF | 80.87 | AB079 | 0.48 |
| DVD665 | HGF | 0.23 | AB079 | 0.39 | long | long | VEGF | 8.09 | AB014 | 1.40 |
| DVD666 | VEGF | 133.6 | AB014 | 1.40 | long | long | HGF | 14.7 | AB079 | 0.39 |
| DVD667 | HGF | 0.33 | AB079 | 0.39 | long | long | VEGF | 51.29 | AB070 | 4.64 |
| DVD668 | VEGF | 135.82 | AB070 | 4.64 | long | long | HGF | 20.23 | AB079 | 0.39 |
| DVD669 | HGF | 0.29 | AB079 | 0.39 | long | long | VEGF | 1663.25 | AB071 | 80.43 |
| DVD670 | VEGF | 48.28 | AB071 | 80.43 | long | long | HGF | 3.1 | AB079 | 0.39 |
| DVD671 | HGF | 0.35 | AB079 | 0.4 | long | short | VEGF | 28.75 | AB014 | 1.40 |
| DVD672 | VEGF | 16.1 | AB014 | 1.40 | long | short | HGF | 22.95 | AB079 | 0.4 |
| DVD673 | HGF | 0.4 | AB079 | 0.4 | long | short | VEGF | 65.28 | AB070 | 4.64 |
| DVD674 | VEGF | 10.57 | AB070 | 4.64 | long | short | HGF | 17.6 | AB079 | 0.4 |
| DVD675 | HGF | 0.48 | AB079 | 0.4 | long | short | VEGF | 5767.36 | AB071 | 80.43 |
| DVD676 | VEGF | 130.31 | AB071 | 80.43 | long | short | HGF | 35.83 | AB079 | 0.4 |
| DVD677 | HGF | 0.33 | AB079 | 0.41 | short | long | VEGF | 1.02 | AB014 | 1.40 |
| DVD678 | VEGF | 0.65 | AB014 | 1.40 | short | long | HGF | 4.69 | AB079 | 0.41 |
| DVD679 | HGF | 0.32 | AB079 | 0.41 | short | long | VEGF | 92.36 | AB070 | 5.62 |
| DVD680 | VEGF | 12.62 | AB070 | 5.62 | short | long | HGF | 5.17 | AB079 | 0.41 |
| DVD681 | HGF | 0.27 | AB079 | 0.41 | short | long | VEGF | 2161.65 | AB071 | 79.48 |
| DVD682 | VEGF | 53.09 | AB071 | 79.48 | short | long | HGF | 6.55 | AB079 | 0.41 |
| DVD709 | HGF | 0.14 | AB012 | 0.16 | short | short | VEGF | 1366.2 | AB070 | 5.62 |
| DVD710 | VEGF | 2.43 | AB070 | 5.62 | short | short | HGF | 17.76 | AB012 | 0.16 |
| DVD711 | HGF | 1.32 | AB012 | 0.16 | short | short | VEGF | 165.93 | AB071 | 79.48 |
| DVD712 | VEGF | 64.2 | AB071 | 79.48 | short | short | HGF | 37.18 | AB012 | 0.16 |

[0615] Two mAbs targeting 2 different epitopes of HER2 (domain II and domain IV) were used to make DVD-Igs with different mAb domain orientation and linker lengths. These DVD-Igs were tested for target binding functions in direct ELISA and Biacore assay.

TABLE 11
Direct Bind ELISA Of 8 DVD Constructs With HER-2 (erbB2)
Sequences, Orientations And Linker Length Combinations To HER-2

| Parent | N-terminal | C-terminal | Direct Bind |
|---|---|---|---|
| Antibody or | Variable | Variable | ELISA |
| DVD-Ig ID | Domain (VD) | Domain (VD) | EC50 (nM) |
| AB004 | HER-2 (domain IV) | | 0.68 |
| AB080 | HER-2 (domain II) | | 3.84 |
| DVD687 | HER-2 (domain IV) | HER-2 (domain II) | 1.71 |
| DVD688 | HER-2 (domain II) | HER-2 (domain IV) | 3.59 |
| DVD689 | HER-2 (domain IV) | HER-2 (domain II) | 0.60 |
| DVD690 | HER-2 (domain II) | HER-2 (domain IV) | 0.48 |
| DVD691 | HER-2 (domain IV) | HER-2 (domain II) | 0.19 |
| DVD692 | HER-2 (domain II) | HER-2 (domain IV) | 5.96 |
| DVD693 | HER-2 (domain IV) | HER-2 (domain II) | 0.16 |
| DVD694 | HER-2 (domain II) | HER-2 (domain IV) | 0.53 |

[0616] Binding of all DVD-Ig constructs to HER-2 was maintained and comparable to that of parent antibodies. All HER-2 domain IV at N-terminal variable domains bound with a similar high or improved affinity as the parent antibody. Some specific combinations of linker length in the heavy chain and light chain improved the binding affinity better than the parent antibodies.

### Example 1.1.1.B

### Redirected Cytotoxicity (rCTL) Assays

[0617] Redirected Cytotoxicity (rCTL) Assays Determine The Ability Of A DVD-Ig To Bring T-Cells And Tumor Cells In Close Proximity So That T-Cells Can Kill Tumor Cells.

[0618] FACS based assay(1): Human CD3+ T cells are isolated from previously frozen isolated PBMC by a negative selection enrichment column (R&D Cat.#HTCC-525). T cells are stimulated for 4 days in flasks coated with 10 μg/mL anti-CD3 (OKT-3, BD) and 2 μg/mL anti-CD28 (CD28.2, Abcam) in complete RPMI media (L-glutamine, 55 mM (3-ME, Pen/Strep, 10% FCS). T cells are rested overnight in 30 U/mL IL-2 (Peprotech) before using in assay. DoHH2 or Raji target cells are labeled with PKH26 (Sigma) according to manufacturer's instructions. RPMI 1640 media (no phenol, Invitrogen) containing L-glutamine and 10% FBS (Hyclone) is used throughout the rCTL assay.

[0619] Effector T cells (E) and targets (T) are plated at 10⁵ and 10⁴ cells/well in 96-well plates (Costar #3799), respectively to give an E:T ratio of 10:1. DVD-Ig molecules are appropriately diluted to obtain concentration-dependent titration curves. After an overnight incubation cells are pelleted and washed with PBS once before resuspending in PBS containing 0.1% BSA (Invitrogen) and 0.5 μg/mL propidium iodide (BD). FACS data is collected on a FACSCanto machine (BD) and analyzed in Flowjo (Treestar).

[0620] The percent live targets in the DVD-Ig treated samples divided by the percent total targets (control, no treatment) is calculated to determine percent specific lysis. The data is graphed and IC50s are calculated in Prism (Graphpad).

[0621] Impedance based(2): T cells are prepared as above. EGFR-expressing target cells are allowed to adhere to ACEA RT-CES 96-well plates (ACEA Bio, San Diego) overnight. Effector T cells (E) and targets (T) are then plated at 2×10⁵ and 2×10⁴ cells/well to give an E:T ratio of 10:1. DVD-Ig molecules are appropriately diluted to obtain concentration-dependent titration curves. The cell indexes of targets in the DVD-Ig treated samples are divided by the cell indexes of control targets (no treatment) to calculate percent specific lysis. The data is graphed and IC50s are calculated in Prism (Graphpad). (Dreier, T. (2002) Int J Cancer 100:690-697; Zhu, J. (2006) J. Immuno. Methods 309:25-33). The sequence of this CD3/CD20 DVD-Ig was disclosed in US Patent Application Serial No. 20070071675.

TABLE 12
Redirected Cellular Cytotoxicity (rCTL) with DVD-Ig

| | | | | | |
|---|---|---|---|---|---|
| | N-terminal | C-terminal | | rCTL | |
| | Variable | Variable | | IC50 | |
| DVD-Ig ID | Domain (VD) | Domain (VD) | Tumor Target Cell | (pM) | Assay |

| | | | | | |
|---|---|---|---|---|---|
| DVD857 | CD3 | CD19 | DoHH2 (DSMZ | 4 | FACS |
| | | | ACC47) | | |
| DVD003 | CD-20 | CD3 | DoHH2 (DSMZ | 283 | FACS |
| | | | ACC47) | | |
| DVD855 | CD3 | CD-20 | DoHH2 (DSMZ | 472 | FACS |
| | | | ACC47) | | |
| DVD856 | CD-20 | CD3 | DoHH2 (DSMZ | 5053 | FACS |
| | | | ACC47) | | |
| DVD859 | CD3 | EGFR | A431(ATCC CRL- | 0.4 | Impedence |
| | | | 1555) | | |
| DVD860 | EGFR | CD3 | A431(ATCC CRL- | 31 | Impedence |
| | | | 1555) | | |
| DVD018 | CD3 | EGFR | A431(ATCC CRL- | 15 | Impedence |
| | | | 1555) | | |
| DVD012 | HER-2 | CD3 | BT-474(ATCC HTB- | 155 | Impedence |
| | | | 20) | | |
| DVD864 | HER-2 | CD3 | BT-474(ATCC HTB- | 49 | Impedence |
| | | | 20) | | |
| DVD865 | CD3 | IGF1R | A431(ATCC CRL- | 58 | Impedence |
| | | | 1555) | | |

[0622] Efficacy of DVD-Ig ID 857 was demonstrated in the DoHH-2 B-cell lymphoma early start flank tumor model. Scid mice were injected in the flank with DoHH2 tumor cells alone or DoHH2 tumor cells plus CD3⁺ T cells purified from peripheral blood in a 10:1 ratio. Rituxan was dose 80 ug iv on day 1 in the absence of T cells. DVD-Ig ID 857 was dosed 80 ug iv daily on days 1-5 to mice given only DoHH2 cells or both DoHH2 cells+T cells. On day 32, the DoHH-2 groups that received T cells or DVD-Ig 857 only had a significant impact on DoHH-2 growth with a % TGI of 63 and 55 respectively. The DoHH-2 treated with rituximab (% TGI=94) demonstrated significant efficacy (p≦0.0001) when compared to the DoHH2 control group. The [T cells+DVD-Ig ID 857] demonstrated equal efficacy as the rituximab group with a % TGI of 95 and 98 respectively (p≦0.0001) when compared to the DoHH2 control group. At day 52, the rituximab and [DVD-Ig ID 857+T cells] group were not significantly different from each other. Kaplan-Meier survival graph (lcc endpoint). Logrank (Mantel-Cox) statistics demonstrated a significant increase of survival in the groups treated with rituximab and [DVD-Ig ID 857+T cells] when compared to the DoHH-2 control group (p≦0.0001). The rituximab and the [DVD-Ig ID 857+T cells] groups were not significantly different from each other.

[0623] The CD3 and CD19 DVD-Ig were generated using the variable domains from Ab002 and AB006 respectively. The IC50s of the DVD-Igs to human CD3 was determined using OKT3-PE (eBioscience, Cat#12-0037) competition FACS analysis on Jurkat cells. The OKT3-PE at EC90 and variations concentrations of the DVD-Igs were mixed together and incubated for one hour on ice with 0.5×10e6 Jurkat cells per well in 96 well round bottom plate (corning #3365). The samples were acquired using a FACS Calibur (Becton Dickinson) analyzed using Flo Jo (Becton Dickinson). The IC50s of the DVD-Igs to human CD19 was determined using sulfo-tagged AB006 on 293 cells stably transfected with human CD19 using meso scale discovery. The sulfo-tagged AB006 at its EC90 was mixed with various concentrations of DVD-Igs and added to 25,000 cells per well of 293 hCD19 cells in 96 well high bind plates (Meso Scale Discovery #L11XB-3). Samples were read on a Sector Image 6000 (Meso Scale Discovery).

TABLE 13
Competition of DVD - Ig with labeled reference Abs

| | | | | Competition | Competition |
|---|---|---|---|---|---|
| N-terminal | C-Terminal | | | Jurkat Cells | 293-hCD19 |
| Varaible | Variable | HC | LC | (OKT3) | (AB006) IC50 |
| Domain (VD) | Domain (VD) | Linker | Linker | IC50 nM | nM |
| CD3 | CD19 | long | long | 1, 0.16 | 73, 180 |
| CD3 | CD19 | short | short | 1.9, 2.9 | 504, >1000 |
| CD3 | CD19 | short | long | 1.1, 3.4 | 70, 200 |
| CD3 | CD19 | long | short | 1.7, 1.3 | 124, 490 |
| CD19 | CD3 | long | long | >1000 | 29 |

### Example 1.1.1.C

### Capture ELISA-VEGF

[0624] ELISA plates (Nunc, MaxiSorp, Rochester, N.Y.) were incubated overnight at 4° C. with anti-human Fc antibody (5 μg/ml in PBS, Jackson Immunoresearch, West Grove, Pa.). Plates were washed three times in washing buffer (PBS containing 0.05% Tween 20), and blocked for 1 hour at 25° C. in blocking buffer (PBS containing 1% BSA). Wells were washed three times, and serial dilutions of each antibody or DVD-Ig in PBS containing 0.1% BSA were added to the wells and incubated at 25° C. for 1 hour. The wells were washed three times, and biotinylated VEGF (2 nM) was added to the plates and incubated for 1 hour at 25° C. The wells were three times, and then incubated for 1 hour at 25° C. with streptavidin-HRP (KPL #474-3000, Gaithersburg, Md.). The wells were washed three times, and 100 μl of ULTRA-TMB ELISA (Pierce, Rockford, Ill.) were added per well. Following color development the reaction was stopped with 1N HCL and absorbance at 450 nM was measured. VEGF capture ELISA data is shown in Table 14.

### Example 1.1.1.D

### IgG-Fc Capture ELISA-RON

[0625] 96-well Nunc-Immuno plates were coated with 2 μg/mL goat-anti-human IgG Fc specific antibody (Jackson Immunoresearch # 109-055-098, West Grove, Pa., 50 μL/well) in PBS (Gibco #10010-023 from Invitrogen, Grand Island, N.Y.), and incubated overnight at 4° C. Plates were washed three times with washing buffer (PBS, 0.05% Tween 20) and subsequently blocked with 100 uL/well of blocking buffer (PBS, 2% BSA) for one hour at room temperature. Plates were washed three times and incubated with 50 μL/well of a 1 μg/mL solution of the appropriate antibody or DVD-Ig for one hour at room temperature. After the one hour incubation, the plates were washed three times and incubated with 50 μL/well of his-tagged, recombinant RON protein (R&D Systems # 1947-MS, Minneapolis, Minn., 1000 nM to 0 nM final dose range) for one hour at room temperature. Plates were washed three times, and 50 μL/well of a rabbit-anti-His tag-HRP antibody (Abeam ab1187, Cambridge, Mass., diluted at 1:10,000 in 2% BSA/PBS solution) was added and plates were incubated at room temperature for one hour. After the final wash, 50 μl/well of TMB substrate (Pierce #34028, Rockford, Ill.) was added, and the reaction was terminated after five minutes using 50 μl/well of 2N H2SO4. The absorbance was read at 450 nm (Spectra Max Plus plate reader, Molecular Devices, Sunnyvale, Calif.). EC50s were calculated in GraphPad Prism 4.03. RON capture ELISA data is shown in Table 14.

### Example 1.1.1.E

### Capture ELISA-IGF1,2

[0626] 96-well Nunc-Immuno plates were coated with 5 μg/ml antibody against human IgG (Fcγ fragment specific, Jackson ImmunoResearch, West Grove, Pa., #109-005-098, 100 μl/well) in D-PBS (Gibco #14190, San Diego, Calif.) and incubated overnight at 4° C. ELISA plates were washed three times in wash buffer (PBS, 0.05% Tween 20) and then blocked with 200 μl/well blocking buffer (D-PBS, 1% BSA) for 1 hour at 25° C. Plates were then washed and incubated with 100 μl/well antibodies or DVD-Igs (0.01 μg/mL-100 μg/mL in blocking buffer) for 1 hour at 37° C. Plates were then washed three times and incubated with biotin-labeled human IGF1 or IGF2 (0.02 nM-100 nM dose range in blocking buffer, 100 μl/well) for 1 hour at 37° C. Plates were washed three times and incubated with streptavidin conjugated with HRP (KPL #474-3000, Gaithersburg, Md., 1:10,000 dilution in blocking buffer, 100 μl/well) for 1 hour at 25° C. After the final wash, plates were incubated with 100 μl/well ELISA substrate (1-Step Ultra TMB-ELISA, Pierce #340280, Rockford, Ill.). The reaction was stopped after 5 minutes at 25° C. with 100 μl/well 2N H2SO4 and the absorbance was read at 450 nm. IGF1,2 capture ELISA data is shown in Table 14.

### Example 1.1.1.F

### Capture ELISA DLL4

[0627] 96-well Nunc-Immuno plates (#439454, Rochester, N.Y.) were coated with 5 μg/ml antibody against human IgG (Fc fragment specific, Jackson ImmunoResearch, West Grove, Pa. #109-005-098, 100 μl/well) in D-PBS (Gibco #14190, Grand Island, N.Y.) and incubated overnight at 4° C. ELISA plates were washed three times with wash buffer (PBS, 0.05% Tween 20) and then blocked with 200 μl/well blocking buffer (D-PBS, 1% BSA, 1 mM CaCl₂, 0.05% Tween 20) for 1 hour at 25° C. Plates were washed three times and incubated with 100 μl/well DLL4 antibodies (0.0001-100 nM, 10-fold serial dilution in blocking buffer) for 1 hour at 25° C., and then washed again three times. Plates containing captured DLL4 Ab were incubated with biotin-labeled human DLL4 extracellular domain (10 nM in blocking buffer, 100 μl/well) for 1 hour at 25° C., washed three times, and incubated with streptavidin conjugated with HRP (KPL #474-3000C, washed three times, and incubated with streptavidin conjugated with HRP (KPL #474-3000, Gaithersburg, Md., 1:10,000 dilution in blocking buffer, 100 μl/well) for 1 hour at 25° C. After the final wash, plates were incubated with 100 μl/well ELISA substrate (1-Step Ultra TMB-ELISA, Pierce #340280, Rockford, Ill.). The reaction was stopped after 2 minutes at 25° C. with 100 μl/well 2N H2SO4 and the absorbance was read at 450 nm. DLL4 capture ELISA data is shown in Table 14.

### Example 1.1.1.G

### Capture ELISA ErbB3 or EGFR

[0628] 96-well ELISA plates were coated with goat anti-human IgG Fc (Jackson Immunoresearch, Pa.) at a concentration of 33 nM, and incubated overnight at 4° C. The plates were washed with PBS containing 0.05% Tween 20 three times and blocked with 200 μl/well of 1% BSA/PBS for 1 hour at room temperature. Fifty μl of 5 nM DVD-Ig or antibody were added to each well and incubated for 1 hour at room temperature. The plates were washed, and then incubated with 50 μl/well of biotinylated ErbB3 or biotinylated EGFR at various concentrations for 1 hour at room temperature. The plates were washed again and then incubated with 50 μl/well of streptavidin-conjugated HRP (KPL #474-3000, Protein Research Products, MD) and incubated for 1 hour at room temperature. The wells were washed three times, and 100 μl of ULTRA-TMB ELISA (Pierce, Rockford, Ill.) were added per well. Following color development, the reaction was stopped with 1N HCL and absorbance at 450 nM was measured.

[0629] Table 14 contains the affinity, expressed as EC50 in nM, of parent antibodies and DVD-Ig constructs in the VEGF, RON, EGFR, IGFR, IGF-1,2, HER-2, DLL4, and ErbB3.

TABLE 14
VEGF, RON, EGFR, ErbB3, IGFR, IGF-1,2, DLL4 and HER-2
Antigen Capture ELISA of Parent Antibodies and DVD-Ig Constructs

| | | | N-terminal | C-terminal |
|---|---|---|---|---|
| Parent | N-terminal | C-terminal | Ag binding in | Ag binding in |
| Antibody or | Variable | Variable | Capture ELISA | Capture ELISA |
| DVD-Ig ID | Domain | Domain | (EC50, nM) | (EC50, nM) |
| AB004 | HER-2 | | 0.4 | |
| AB010 | IGF1,2 | | 4.8, 10 | |
| DVD029 | HER-2 | IGF1,2 | | 229, 206 |
| DVD030 | IGF1,2 | HER-2 | 1.8, 5.5 | 10.7 |
| AB033 | EGFR | | 0.3 | |
| AB011 | IGF1R | | 0.3 | |
| DVD021 | EGFR | IGF1R | 0.3 | 135 |
| DVD022 | IGF1R | EGFR | 0.3 | 0.7 |
| AB005 | RON | | 1.6 | |
| DVD024 | RON | EGFR | 1.96 | |
| DVD023 | EGFR | RON | | >100 |
| AB004 | HER-2 | | 0.2 | |
| AB011 | IGF1R | | 0.3 | |
| DVD031 | HER-2 | IGF1R | 0.3 | 171 |
| DVD032 | IGF1R | HER-2 | 0.2 | 11 |
| AB005 | RON | | 0.7 | |
| AB012 | HGF | | | |
| DVD033 | RON | HGF | 2.5 | |
| DVD034 | HGF | RON | | |
| AB014 | VEGF | | 0.24 | |
| DVD035 | VEGF | EGFR | 0.24 | |
| AB014 | VEGF | | 0.24 | |
| DVD038 | HER-2 | VEGF | | 2.00 |
| AB014 | VEGF | | 0.9 | |
| AB010 | IGF1,2 | | 4.8, 18.1 | |
| DVD041 | VEGF | IGF1,2 | 0.7 | 381, 7335 |
| DVD042 | IGF1,2 | VEGF | 2.5, 17.6 | 42.3 |
| AB015 | DLL-4 | | 0.03 | |
| AB014 | VEGF | | 0.24 | |
| DVD044 | DLL4 | VEGF | 0.06 | 4.20 |
| DVD043 | VEGF | DLL4 | 0.20 | 0.50 |
| AB014 | VEGF | | 0.24 | |
| AB012 | HGF | | | |
| DVD045 | VEGF | HGF | 0.29 | >100 |
| AB005 | RON | | 1.3 | |
| AB014 | VEGF | | 0.24 | |
| DVD048 | RON | VEGF | 2.7 | 3.60 |
| DVD047 | VEGF | RON | 0.36 | >100 |
| AB014 | VEGF | | 0.24 | |
| DVD049 | VEGF | NRP1 | 4.80 | |
| DVD050 | NRP1 | VEGF | | 2.30 |
| AB014 | VEGF | | 0.53 | |
| DVD260 | PlGF | VEGF | | 1.70 |
| AB062 | ErbB3 | | 0.26 | |
| DVD299 | ErbB3 | EGFR | 0.25 | >10.0 |
| AB063 | ErbB3 | | 0.67 | |
| AB033 | EGFR | | | |
| DVD305 | ErbB3 | EGFR | 0.92 | >10.0 |
| DVD306 | EGFR | ErbB3 | 0.48 | >10.0 |
| DVD385 | ErbB3 | EGFR | 0.36 | 1.1 |
| DVD409 | ErbB3 | EGFR | 0.54 | 2.5 |
| DVD410 | EGFR | ErbB3 | >10 | 0.77 |
| DVD413 | ErbB3 | EGFR | 0.59 | 0.71 |

[0630] Binding of all DVD-Ig constructs to soluble antigen was maintained and comparable to parent antibodies. All N-terminal variable domains bound with a similar high affinity as to the parent antibody as well as the C-terminal variable domains of DVD022, DVD038, DVD043, DVD048, DVD50 and DVD260.

TABLE 15

DLL4 Antigen Capture ELISA of 7 DLL4/VEGF DVD-Ig
Constructs and the Parent Antibody

| | | | | | | DVD-Ig | | Ref. Ab. |
|---|---|---|---|---|---|---|---|---|
| | | | | | | DLL4 | | DLL4 |
| | | | | | | Capture | | Capture |
| | | | | | Other | ELISA | Ref. | ELISA |
| DVD-Ig | Sequence | | HC | LC | DVD-Ig | EC50 | Ab. | EC50 |
| ID | ID | Orientation | linker | linker | VD | (nM) | ID | (nM) |
| DVD470 | DLL4 | C-term. | Long | Long | VEGF | 0.16 | AB015 | 0.15 |
| | (Seq. 1) | | | | (Seq. 1) | | | |
| DVD476 | DLL4 | C-term. | Long | Short | VEGF | 0.21 | AB015 | 0.18 |
| | (Seq. 1) | | | | (Seq. 1) | | | |
| DVD482 | DLL4 | C-term. | Short | Long | VEGF | 0.17 | AB015 | 0.18 |
| | (Seq. 1) | | | | (Seq. 1) | | | |
| DVD474 | DLL4 | C-term. | Long | Long | VEGF | 0.14 | AB015 | 0.15 |
| | (Seq. 1) | | | | (Seq. 2) | | | |
| DVD486 | DLL4 | C-term. | Short | Long | VEGF | 0.16 | AB015 | 0.14 |
| | (Seq. 1) | | | | (Seq. 2) | | | |
| DVD485 | DLL4 | N-term. | Short | Long | VEGF | 5.45 | AB015 | 0.14 |
| | (Seq. 1) | | | | (Seq. 2) | | | |
| DVD471 | DLL4 | N-term. | Long | Long | VEGF | 0.17 | AB015 | 0.15 |
| | (Seq. 1) | | | | (Seq. 3) | | | |

[0631] Binding of all DVD-Ig constructs to DLL4 antigen was maintained and comparable to parent antibodies. All N-terminal variable domains bound with a similar high affinity as to the parent antibody as well as the C-terminal variable domains of DVD470, DVD476, DVD482, DVD474 and DVD486.

TABLE 16

VEGF Antigen Capture ELISA of 7 DLL4/VEGF DVD-Ig
Constructs and Parent Antibodies

| | | | | | | | | |
|---|---|---|---|---|---|---|---|---|
| | | | | | | DVD-Ig | | Ref. Ab. |
| | | | | | | VEGF | | VEGF |
| | | | | | | Capture | | Capture |
| | | | | | Other | ELISA | | ELISA |
| DVD-Ig | Sequence | | HC | LC | DVD-Ig | EC50 | Ref. Ab. | EC50 |
| ID | ID | Orientation | linker | linker | VD | (nM) | ID | (nM) |

| | | | | | | | | |
|---|---|---|---|---|---|---|---|---|
| DVD470 | DLL4 | C-term. | Long | Long | VEGF | 0.27 | AB014 | 0.21 |
| | (Seq. 1) | | | | (Seq. 1) | | | |
| DVD476 | DLL4 | C-term. | Long | Short | VEGF | 0.22 | AB014 | 0.21 |
| | (Seq. 1) | | | | (Seq. 1) | | | |
| DVD482 | DLL4 | C-term. | Short | Long | VEGF | 0.22 | AB014 | 0.21 |
| | (Seq. 1) | | | | (Seq. 1) | | | |
| DVD474 | DLL4 | C-term. | Long | Long | VEGF | 1.65 | AB071 | 0.38 |
| | (Seq. 1) | | | | (Seq. 2) | | | |
| DVD486 | DLL4 | C-term. | Short | Long | VEGF | 0.53 | AB071 | 0.38 |
| | (Seq. 1) | | | | (Seq. 2) | | | |
| DVD485 | DLL4 | N-term. | Short | Long | VEGF | 2.5 | AB071 | 0.38 |
| | (Seq. 1) | | | | (Seq. 2) | | | |
| DVD471 | DLL4 | N-term. | Long | Long | VEGF | 0.56 | AB070 | 0.35 |
| | (Seq. 1) | | | | (Seq. 3) | | | |

[0632] Binding of all DVD-Ig constructs to VEGF antigen was maintained and comparable to parent antibodies. All N-terminal variable domains bound with a similar high affinity as to the parent antibody as well as the C-terminal variable domains of DVD470, DVD476, DVD482, DVD474 and DVD486.

### Example 1.1.1.H

### Inhibition of Ligand Independent ErbB3 and EGFR Phosphorylation In Vitro by Parent ErbB3 Antibody, EGFR Antibody and DVD-12 Constructs

[0633] A431 cells were grown in 96 well plate with 40,000 cells/well and incubated at 37° C., 5% CO₂ for 18-24 hours. After incubation, the cells were washed twice with 1× D-PBS and starved overnight in serum-free medium. The next day, cells were incubated with 50 μl of serum-free media containing 60 μM of monoclonal antibodies or DVD-Igs for 4 hour at 37° C. Following antibody incubation, cells were then washed twice with ice-cold D-PBS and harvested in 10 μl Cell Extraction Buffer (Biosource International, Carlsbad, Calif.) containing 10 μl of HALT® phosphatase inhibitor cocktail (Thermo Scientific, Rockford, Ill.), one Complete® EDTA-free protease inhibitor tablet (1 tablet/10 ml, Roche Diagnostic, Mannheim, Germany), and PMSF. Cell lysates were incubated on ice for 30 minutes with intermittent vortexing, pre-cleared by centrifugation (10 min, 14,000 RPM, 4° C.), and processed for ELISA analysis. Phosphor-ErbB3 was detected by using a Human Phospho-ErbB3 detection kit (R&D Systems #DYC1769, Minneapolis, Minn.) according to manufacturer's protocol. Detection of phosphor-EGFR was using the Human Phospho-EGF R DuoSet kit (R&D Systems #DYC1095, Minneapolis, Minn.) according to manufacturer's protocol.

TABLE 16A
Inhibition Of Phosphorylation Of ErbB3 And EGFR in A431 Cells
By ErbB3 Parent Antibody And DVD-Ig Constructs

| Parent | | | Inhibition Of | Inhibition Of |
|---|---|---|---|---|
| Antibody | N-terminal | C-terminal | ErbB3 | EGFR |
| or | Variable | Variable | Phosphorylation | Phosphorylation |
| DVD-Ig | Domain | Domain | (% Inhibition At | (% Inhibition At |
| ID | (VD) | (VD) | 60 nM Ab/DVD) | 60 nM Ab/DVD) |
| AB062 | ErbB3 | | 72% | 0% |
| AB033 | EGFR | | 28% | 54% |
| DVD385 | ErbB3 | EGFR | 77% | 61% |
| DVD409 | ErbB3 | EGFR | 82% | 63% |
| DVD413 | ErbB3 | EGFR | 83% | 62% |
| DVD299 | ErbB3 | EGFR | 77% | 55% |

| | | | |
|---|---|---|---|
| AB008 | CD22 | 0% | 4% |

### Example 1.1.1.I

### Growth Inhibitory Effect of an ErbB3 or EGFR Monoclonal Antibody or DVD-12s In Vitro

[0634] ErbB3, EGFR monoclonal antibodies or DVD-Igs diluted in D-PBS-BSA (Dulbecco's phosphate buffered saline with 0.1% BSA) were added to A431 cells in 96 well plate at final concentrations of 2.4 and 21.6 nM in 180 uL. The plates were incubated at 37° C. in a humidified, 5% CO₂ atmosphere for 3 days. Cell survival/proliferation was measured indirectly by assessing ATP levels using an ATPlite kit (Perkin Elmer, Waltham, Mass.) according to the manufacturer's instructions. Wells without antibody treatment were used as controls of 0% inhibition whereas wells without cells were considered to show 100% inhibition.

TABLE 16B
Inhibition A431 Proliferation By ErbB3 Parent Antibody And DVD-Ig
Constructs

| | | | | Inhibition |
|---|---|---|---|---|
| | | | | Of A431 |
| Parent | N-terminal | C-terminal | Inhibition Of A431 | Proliferation |
| Antibody | Variable | Variable | Proliferation | (% Inhibition |
| or DVD-Ig | Domain | Domain | (% Inhibition At | At 21.6 nM |
| ID | (VD) | (VD) | 2.4 nM Ab/DVD) | Ab/DVD) |
| AB062 | ErbB3 | | 14% | 27% |
| AB033 | EGFR | | 14% | 49% |
| DVD385 | ErbB3 | EGFR | 57% | 78% |
| DVD409 | ErbB3 | EGFR | 65% | 78% |
| DVD413 | ErbB3 | EGFR | 52% | 76% |
| DVD299 | ErbB3 | EGFR | 52% | 70% |

| | | | |
|---|---|---|---|
| AB008 | CD22 | ND | 6% |

### Example 1.1.1.J

### Affinity Determination Using BIACORE Technology

TABLE 17
Reagent Used in Biacore Analyses

| Assay | Antigen | Vendor Designation | Vendor | Catalog # |
|---|---|---|---|---|
| DLL4 | DLL4 | DLL ECD His tag | R&D | 1506-D4-050 |
| EGFR | EGFR | EGFR ECD | R&D | 1095-ER |
| HER-2 | HER-2/FC | ErbB2/FC | R&D | 1129-ER-050 |
| | | chimera-His tag | | |
| HGF | HGF | HGF | R&D | 294-HG-025 |
| IGF1 | IGF1 | IGF-I | R&D | 291-G1-050 |
| IGF2 | IGF2 | IGF-2 | R&D | 292-G2-050 |
| IGF1R | IGF1R | IGF1R ECD | R&D | 391-GR-050 |
| NRP1 | NRP1 | Neuropilin-1 Npn-1-His | R&D | 3870-N1-025 |
| | | tag | | |
| PlGF | PlGF | Placental GF | R&D | 264-PG-050 |
| RON | RON | MSP Receptor ECD-His | R&D | 1947-MS-050 |
| | | tag | | |
| VEGF | VEGF | VEGF | R&D | 293-VE-010 |
| ErbB3 | ErbB3 | ErbB3/FC | R&D | 348-RB |
| | | Chimera-His tag | | |

ECD = Extracellular Domain
/FC = antigen/IgG FC domain fusion protein

### BIACORE Methods:

[0636] The BIACORE assay (Biacore, Inc, Piscataway, N.J.) determines the affinity of antibodies or DVD-Ig with kinetic measurements of on-rate and off-rate constants. Binding of antibodies or DVD-Ig to a target antigen (for example, a purified recombinant target antigen) is determined by surface plasmon resonance-based measurements with a Biacore® 1000 or 3000 instrument (Biacore® AB, Uppsala, Sweden) using running HBS-EP (10 mM HEPES [pH 7.4], 150 mM NaCl, 3 mM EDTA, and 0.005% surfactant P20) at 25° C. All chemicals are obtained from Biacore® AB (Uppsala, Sweden) or otherwise from a different source as described in the text. For example, approximately 5000 RU of goat anti-mouse IgG, (Fcγ), fragment specific polyclonal antibody (Pierce Biotechnology Inc, Rockford, Ill.) diluted in 10 mM sodium acetate (pH 4.5) is directly immobilized across a CM5 research grade biosensor chip using a standard amine coupling kit according to manufacturer's instructions and procedures at 25 μg/ml. Unreacted moieties on the biosensor surface are blocked with ethanolamine. Modified carboxymethyl dextran surface in flowcell 2 and 4 is used as a reaction surface. Unmodified carboxymethyl dextran without goat anti-mouse IgG in flow cell 1 and 3 is used as the reference surface. For kinetic analysis, rate equations derived from the 1:1 Langmuir binding model are fitted simultaneously to association and dissociation phases of all eight injections (using global fit analysis) with the use of Biaevaluation 4.0.1 software. Purified antibodies or DVD-Ig are diluted in HEPES-buffered saline for capture across goat anti-mouse IgG specific reaction surfaces. Antibodies or DVD-Ig to be captured as a ligand (25 μg/ml) are injected over reaction matrices at a flow rate of 5 μl/min. The association and dissociation rate constants, kₒₙ (M⁻¹s⁻¹) and k_{off} (s⁻¹) are determined under a continuous flow rate of 25 μl/min. Rate constants are derived by making kinetic binding measurements at different antigen concentrations ranging from 10-200 nM. The equilibrium dissociation constant (M) of the reaction between antibodies or DVD-Igs and the target antigen is then calculated from the kinetic rate constants by the following formula: K_{D}=k_{off}/kₒₙ. Binding is recorded as a function of time and kinetic rate constants are calculated. In this assay, on-rates as fast as 10⁶ M⁻¹s⁻¹ and off-rates as slow as 10⁻⁶ s⁻¹ can be measured.

TABLE 18
BIACORE Analysis of Parental Antibodies and DVD Constructs

| | N-Terminal | C-Terminal | | | |
|---|---|---|---|---|---|
| | Variable | Variable | | | |
| Parent Antibody | Domain | Domain | kₒₙ | k_{off} | K_{D} |
| or DVD-Ig ID | (VD) | (VD) | (M−1s−1) | (s−1) | (M) |
| AB011 | IGF1R | | 7.32E+04 | 6.21E−05 | 8.48E−10 |
| DVD021 | EGFR | | 1.22E+06 | 1.80E−03 | 1.47E−9 |
| DVD021 | | IGF1R | | | |
| DVD022 | IGF1R | | 1.06E+05 | 8.25E−05 | 7.78E−10 |
| DVD022 | | EGFR | 8.03E+04 | 2.26E−04 | 2.81E−9 |
| AB004 | HER-2 | | 3.22E+05 | 1.28E−05 | 3.97E−11 |
| AB011 | IGF1R | | 7.32E+04 | 6.21E−05 | 8.48E−10 |
| DVD031 | HER-2 | | 3.30E+05 | 7.02E−06 | 2.12E−11 |
| DVD031 | | IGF1R | | | |
| DVD032 | IGF1R | | 5.10E+04 | 4.23E−05 | 8.29E−10 |
| DVD032 | | HER-2 | 1.84E+04 | 9.31E−06 | 5.05E−10 |
| AB004 | HER-2 | | 3.22E+05 | 1.28E−05 | 3.97E−11 |
| AB010 | IGF1 | | 3.17E+06 | 1.23E−03 | 3.88E−10 |
| AB010 | IGF2 | | 6.47E+06 | 2.74E−06 | 4.23E−13 |
| DVD029 | HER-2 | | 2.42E+05 | 9.64E−06 | 3.98E−11 |
| DVD029 | | IGF1 | 6.65E+04 | 4.23E−04 | 6.36E−9 |
| DVD029 | | IGF2 | 1.04E+05 | 3.15E−05 | 3.02E−10 |
| DVD030 | IGF1 | | 3.96E+06 | 1.16E−03 | 2.92E−10 |
| DVD030 | IGF2 | | 8.46E+06 | 1.98E−05 | 2.34E−12 |
| DVD030 | | HER-2 | 1.54E+05 | 7.36E−04 | 4.77E−9 |
| AB033 | EGFR | | 7.93E+04 | 1.39E−03 | 1.75E−8 |
| AB004 | HER-2 | | 3.22E+05 | 1.28E−05 | 3.97E−11 |
| DVD015 | EGFR | | 1.79E+06 | 1.96E−03 | 1.09E−9 |
| DVD015 | | HER-2 | | | |
| DVD016 | HER-2 | | 2.44E+05 | 4.36E−06 | 1.78E−11 |
| DVD016 | | EGFR | 2.36E+04 | 4.53E−04 | 1.92E−8 |
| AB014 | VEGF | | 1.47E+05 | 3.03E−05 | 2.07E−10 |
| AB010 | IGF1 | | | | |
| AB010 | IGF2 | | 3.35E+06 | <1.00E−06 | <2.99E−13 |
| DVD041 | VEGF | | 5.26E+05 | 2.39E−06 | 4.55E−12 |
| DVD041 | | IGF1 | | | |
| DVD041 | | IGF2 | 8.09E+04 | <1.00E−06 | <1.24E−11 |
| DVD042 | IGF1 | | | | |
| DVD042 | IGF2 | | 5.20E+06 | 5.18E−06 | 9.98E−13 |
| DVD042 | | VEGF | 3.45E+04 | 1.46E−05 | 4.21E−10 |
| AB005 | RON | | 3.66E+04 | 7.39E−04 | 2.02E−8 |
| AB033 | EGFR | | 7.93E+04 | 1.39E−03 | 1.75E−8 |
| DVD024 | RON | | 4.56E+04 | 8.52E−04 | 1.86E−8 |
| DVD024 | | EGFR | | | |
| DVD023 | EGFR | | 2.08E+06 | 2.22E−03 | 1.06E−9 |
| DVD023 | | RON | | | |
| AB005 | RON | | 3.66E+04 | 7.39E−04 | 2.02E−8 |
| AB012 | HGF | | >1.00E+7 | 2.84E−04 | <2.84E−11 |
| DVD033 | RON | | 1.56E+05 | 1.18E−03 | 7.60E−09 |
| DVD033 | | HGF | 2.97E+05 | 9.20E−05 | 3.10E−10 |
| DVD034 | HGF | | 3.05E+06 | 6.55E−05 | 2.15E−11 |
| DVD034 | | RON | | | |
| AB005 | RON | | 3.66E+04 | 7.39E−04 | 2.01E−8 |
| AB014 | VEGF | | 3.06E+05 | 3.99E−06 | 1.30E−11 |
| DVD048 | RON | | | | |
| DVD048 | | VEGF | 3.85E+04 | 4.50E−05 | 1.17E−9 |
| DVD047 | VEGF | | 3.46E+05 | 2.79E−05 | 8.06E−11 |
| DVD047 | | RON | | | |
| AB015 | DLL-4 | | 4.00E+05 | 1.66E−04 | 4.14E−10 |
| AB014 | VEGF | | 1.47E+05 | 3.03E−05 | 2.07E−10 |
| DVD044 | DLL4 | | 5.90E+05 | 2.05E−04 | 3.47E−10 |
| DVD044 | | VEGF | 3.67E+04 | 1.13E−05 | 3.08E−10 |
| DVD043 | VEGF | | 4.94E+05 | 8.26E−06 | 1.67E−11 |
| DVD043 | | DLL4 | 9.37E+04 | 2.17E−04 | 2.32E−09 |
| AB015 | DLL-4 | | | | |
| AB047 | PlGF | | 3.80E+06 | 1.08E−04 | 2.84E−11 |
| DVD257 | DLL4 | | 8.35E+05 | 1.96E−04 | 2.34E−10 |
| DVD257 | | PlGF | 3.02E+05 | 1.11E−04 | 3.67E−10 |
| DVD258 | PlGF | | >1.00E+07 | 2.54E−03 | <2.54E−10 |
| DVD258 | | DLL4 | | | |
| AB014 | VEGF | | 1.47E+05 | 3.03E−05 | 2.07E−10 |
| AB033 | EGFR | | 8.85E+05 | 1.23E−03 | 1.39E−09 |
| DVD035 | VEGF | | 2.25E+05 | 1.73E−05 | 8.23E−11 |
| DVD035 | | EGFR | | | |
| DVD036 | EGFR | | 1.21E+06 | 1.57E−03 | 1.30E−09 |
| DVD036 | | VEGF | 4.80E+04 | 3.19E−04 | 6.65E−09 |
| AB014 | VEGF | | 3.07E+05 | 3.39E−05 | 1.06E−11 |
| AB004 | HER-2 | | 3.02E+05 | 1.03E−05 | 3.40E−11 |
| DVD037 | VEGF | | 4.45E+05 | <1.00E−06 | <2.25E−12 |
| DVD037 | | HER-2 | 7.61E+03 | 2.83E−06 | 3.72E−10 |
| DVD038 | HER-2 | | 1.95E+05 | 4.81E−06 | 2.47E−11 |
| DVD038 | | VEGF | 3.67E+04 | <1.00E−06 | <2.27E−11 |
| AB014 | VEGF | | 1.47E+05 | 3.03E−05 | 2.07E−10 |
| AB012 | HGF | | >1.00E+7 | 2.84E−04 | <2.84E−11 |
| DVD045 | VEGF | | 2.01E+05 | 3.05E−06 | 1.52E−11 |
| DVD045 | | HGF | 1.84E+05 | 1.66E−04 | 9.01E−10 |
| DVD046 | HGF | | >1.00E+7 | 2.36E−04 | <2.36E−11 |
| DVD046 | | VEGF | | | |
| AB014 | VEGF | | 3.06E+05 | 3.99E−06 | 1.30E−11 |
| AB016 | NRP1 | | 1.47E+05 | 3.90E−04 | 2.67E−9 |
| DVD049 | VEGF | | | | |
| DVD049 | | NRP1 | 1.42E+05 | 1.81E−04 | 1.28E−9 |
| DVD050 | NRP1 | | 1.82E+05 | 2.61E−04 | 1.440E−9 |
| DVD050 | | VEGF | 1.82E+05 | 2.61E−04 | 1.440E−9 |
| AB014 | VEGF | | 3.07E+05 | 3.39E−05 | 1.06E−10 |
| AB047 | PlGF | | 3.80E+06 | 1.08E−04 | 2.85E−11 |
| DVD259 | VEGF | | 5.02E+05 | 2.06E−05 | 4.12E−11 |
| DVD259 | | PlGF | 2.99E+05 | 9.87E−05 | 3.30E−10 |
| DVD260 | PlGF | | 4.27E+06 | 5.14E−05 | 1.20E−11 |
| DVD260 | | VEGF | 4.99E+04 | 2.05E−05 | 4.11E−10 |
| AB033 | EGFR | | 8.85E+05 | 1.23E−03 | 1.39E−09 |
| AB012 | HGF | | >1.00E+7 | 2.84E−04 | <2.84E−11 |
| DVD025 | EGFR | | 7.31E+05 | 1.44E−03 | 1.98E−09 |
| DVD025 | | HGF | 3.05E+05 | 2.28E−04 | 7.46E−10 |
| DVD026 | HGF | | 4.19E+06 | 6.67E−05 | 1.59E−11 |
| DVD026 | | EGFR | | | |
| AB062 | ErbB3 | | 8.66E+04 | 1.17E−04 | 1.360E−9 |
| AB033 | EGFR | | 7.93E+04 | 1.39E−03 | 1.75E−8 |
| DVD299 | ErbB3 | | 1.95E+05 | 1.60E−04 | 8.20E−10 |
| DVD299 | | EGFR | 3.26E+04 | 4.48E−04 | 1.37E−8 |
| DVD300 | EGFR | | 1.52E+06 | 1.69E−03 | 1.11E−9 |
| DVD300 | | ErbB3 | | | |
| AB063 | ErbB3 | | 1.17E+06 | 1.75E−04 | 1.50E−10 |
| AB033 | EGFR | | 7.93E+04 | 1.39E−03 | 1.75E−8 |
| DVD305 | ErbB3 | | 2.27E+06 | 1.37E−04 | 6.03E−11 |
| DVD305 | | EGFR | 3.99E+04 | 3.17E−04 | 7.940E−9 |
| DVD306 | EGFR | | 1.82E+06 | 1.86E−03 | 1.020E−9 |
| DVD306 | | ErbB3 | | | |

[0637] Binding of all DVD-Ig constructs characterized by Biacore technology was maintained and comparable to that of parent antibodies. All N-terminal variable domains bound with a similar high affinity as the parent antibody as well as the C-terminal variable domains of DVD-Ig constructs DVD022, DVD016, DVD042, DVD 044, DVD043, DVD038, DVD049, DVD260, DVD299, and DVD305.

TABLE 19
BIACORE Analysis of Parental Antibodies and DVD Constructs

| Ref Ab or | | | | | |
|---|---|---|---|---|---|
| DVD-Ig | N-Term. | C-Term. | kₒₙ | k_{off} | K_{D} |
| ID | VD | VD | (M-1s-1) | (s-1) | (M) |
| AB004 | HER-2 (domain IV) | | 1.09E+05 | 2.01E−04 | 1.84E−09 |
| AB080 | HER-2 (domain II) | | 7.03E+04 | 4.21E−04 | 5.99E−09 |
| DVD687 | HER-2 | HER-2 (domain | 1.03E+05 | 7.80E−05 | 7.57E−10 |
| | (domain IV) | II) | | | |
| DVD688 | HER-2 | HER-2 (domain | 4.85E+04 | 2.66E−04 | 5.48E−09 |
| | (domain II) | IV) | | | |
| DVD689 | HER-2 | HER-2 (domain | N/A | N/A | N/A |
| | (domain IV) | II) | | | |
| DVD690 | HER-2 | HER-2 (domain | N/A | N/A | N/A |
| | (domain II) | IV) | | | |
| DVD691 | HER-2 | HER-2 (domain | 1.18E+05 | 6.10E−05 | 5.17E−10 |
| | (domain IV) | II) | | | |
| DVD692 | HER-2 | HER-2 (domain | 4.66E+04 | 1.35E−04 | 2.90E−09 |
| | (domain II) | IV) | | | |
| DVD693 | HER-2 | HER-2 (domain | 1.26E+05 | 1.86E−05 | 1.48E−10 |
| | (domain IV) | II) | | | |
| DVD694 | HER-2 | HER-2 (domain | 7.89E+04 | 1.46E−04 | 1.85E−09 |
| | (domain II) | IV) | | | |

[0638] Binding of 6 DVD-Ig constructs characterized by Biacore technology was comparable to or better than that of parent antibodies. All HER-2 domain IV at N-terminal variable domains bound with 10 to 40 times higher affinity than that of the parent antibodies, and all HER-2 domain IV at the C-terminal variable domains of DVD-Ig constructs exhibit comparable affinity to that of the parent antibodies.

TABLE 20
BIACORE Analysis of VEGF domain in VEGF/DLL4 DVD Constructs

| | | DLL4 | C- | N- | | | | | |
|---|---|---|---|---|---|---|---|---|---|
| DVD-Ig | VEGF | Seq. | Term. | Term. | HC | LC | DLL4 | DLL4 | DLL4 |
| ID | Seq. ID | ID | VD | VD | linker | linker | ka | kd | KD |
| DVD044 | VEGF | DLL4 | VEGF | DLL4 | S | S | 6.69E+05 | 1.45E−04 | 2.16E−10 |
| | (Seq. 1) | (seq. 1) | | | | | | | |
| DVD469 | VEGF | DLL4 | VEGF | DLL4 | L | L | 1.41E+05 | 7.27E−05 | 5.15E−10 |
| | (Seq. 1) | (seq. 1) | | | | | | | |
| DVD475 | VEGF | DLL4 | VEGF | DLL4 | L | S | 4.52E+05 | 1.95E−04 | 4.31E−10 |
| | (Seq. 1) | (seq. 1) | | | | | | | |
| DVD481 | VEGF | DLL4 | VEGF | DLL4 | S | L | 1.87E+05 | 2.41E−04 | 1.29E−09 |
| | (Seq. 1) | (seq. 1) | | | | | | | |
| DVD441 | VEGF | DLL4 | VEGF | DLL4 | S | S | 1.25E+05 | 5.71E−04 | 4.59E−09 |
| | (Seq. 1) | (seq. 2) | | | | | | | |
| DVD447 | VEGF | DLL4 | VEGF | DLL4 | L | L | 9.92E+04 | 5.13E−04 | 5.17E−09 |
| | (Seq. 1) | (seq. 2) | | | | | | | |
| DVD453 | VEGF | DLL4 | VEGF | DLL4 | L | S | 1.19E+05 | 5.97E−04 | 5.03E−09 |
| | (Seq. 1) | (seq. 2) | | | | | | | |
| DVD459 | VEGF | DLL4 | VEGF | DLL4 | S | L | 1.22E+05 | 5.44E−04 | 4.48E−09 |
| | (Seq. 1) | (seq. 2) | | | | | | | |
| DVD511 | VEGF | DLL4 | VEGF | DLL4 | S | S | 1.21E+06 | 1.73E−03 | 1.43E−09 |
| | (Seq. 1) | (seq. 3) | | | | | | | |
| DVD517 | VEGF | DLL4 | VEGF | DLL4 | L | L | 1.19E+06 | 1.76E−03 | 1.48E−09 |
| | (Seq. 1) | (seq. 3) | | | | | | | |
| DVD523 | VEGF | DLL4 | VEGF | DLL4 | L | S | 1.08E+06 | 2.09E−03 | 1.93E−09 |
| | (Seq. 1) | (seq. 3) | | | | | | | |
| DVD529 | VEGF | DLL4 | VEGF | DLL4 | S | L | 8.40E+05 | 1.51E−03 | 1.80E−09 |
| | (Seq. 1) | (seq. 3) | | | | | | | |
| DVD487 | VEGF | DLL4 | VEGF | DLL4 | S | S | 2.84E+05 | 8.19E−05 | 2.88E−10 |
| | (Seq. 1) | (seq. 4) | | | | | | | |
| DVD493 | VEGF | DLL4 | VEGF | DLL4 | L | L | 2.92E+05 | 4.00E−05 | 1.37E−10 |
| | (Seq. 1) | (seq. 4) | | | | | | | |
| DVD499 | VEGF | DLL4 | VEGF | DLL4 | L | S | 2.71E+05 | 8.01E−05 | 2.95E−10 |
| | (Seq. 1) | (seq. 4) | | | | | | | |
| DVD505 | VEGF | DLL4 | VEGF | DLL4 | S | L | 2.62E+05 | 4.02E−05 | 1.53E−10 |
| | (Seq. 1) | (seq. 4) | | | | | | | |
| DVD043 | VEGF | DLL4 | DLL4 | VEGF | S | S | 3.34E+04 | 2.81E−04 | 8.40E−09 |
| | (Seq. 1) | (seq. 1) | | | | | | | |
| DVD470 | VEGF | DLL4 | DLL4 | VEGF | L | L | 6.84E+04 | 7.02E−05 | 1.03E−09 |
| | (Seq. 1) | (seq. 1) | | | | | | | |
| DVD476 | VEGF | DLL4 | DLL4 | VEGF | L | S | 5.63E+04 | 1.67E−04 | 2.96E−09 |
| | (Seq. 1) | (seq. 1) | | | | | | | |
| DVD482 | VEGF | DLL4 | DLL4 | VEGF | S | L | 1.11E+05 | 2.32E−04 | 2.08E−09 |
| | (Seq. 1) | (seq. 1) | | | | | | | |
| DVD442 | VEGF | DLL4 | DLL4 | VEGF | S | S | 1.33E+05 | 2.18E−04 | 1.65E−09 |
| | (Seq. 1) | (seq. 2) | | | | | | | |
| DVD448 | VEGF | DLL4 | DLL4 | VEGF | L | L | 1.92E+04 | 1.93E−04 | 1.01E−08 |
| | (Seq. 1) | (seq. 2) | | | | | | | |
| DVD454 | VEGF | DLL4 | DLL4 | VEGF | L | S | 3.25E+03 | 2.37E−04 | 7.29E−08 |
| | (Seq. 1) | (seq. 2) | | | | | | | |
| DVD460 | VEGF | DLL4 | DLL4 | VEGF | S | L | 1.54E+04 | 2.60E−04 | 1.69E−08 |
| | (Seq. 1) | (seq. 2) | | | | | | | |
| DVD512 | VEGF | DLL4 | DLL4 | VEGF | S | S | 2.58E+05 | 7.57E−04 | 2.94E−09 |
| | (Seq. 1) | (seq. 3) | | | | | | | |
| DVD518 | VEGF | DLL4 | DLL4 | VEGF | L | L | 1.22E+05 | 4.54E−04 | 3.72E−09 |
| | (Seq. 1) | (seq. 3) | | | | | | | |
| DVD524 | VEGF | DLL4 | DLL4 | VEGF | L | S | 9.28E+04 | 8.77E−04 | 9.45E−09 |
| | (Seq. 1) | (seq. 3) | | | | | | | |
| DVD530 | VEGF | DLL4 | DLL4 | VEGF | S | L | 4.07E+05 | 2.19E−03 | 5.38E−09 |
| | (Seq. 1) | (seq. 3) | | | | | | | |
| DVD488 | VEGF | DLL4 | DLL4 | VEGF | S | S | 1.59E+05 | 6.62E−05 | 4.18E−10 |
| | (Seq. 1) | (seq. 4) | | | | | | | |
| DVD494 | VEGF | DLL4 | DLL4 | VEGF | L | L | 1.32E+05 | 1.83E−04 | 1.39E−09 |
| | (Seq. 1) | (seq. 4) | | | | | | | |
| DVD500 | VEGF | DLL4 | DLL4 | VEGF | L | S | 1.05E+05 | 5.72E−05 | 5.48E−10 |
| | (Seq. 1) | (seq. 4) | | | | | | | |
| DVD506 | VEGF | DLL4 | DLL4 | VEGF | S | L | 7.07E+04 | 1.04E−04 | 1.47E−09 |
| | (Seq. 1) | (seq. 4) | | | | | | | |
| DVD467 | VEGF | DLL4 | VEGF | DLL4 | S | S | 5.85E+05 | 1.77E−04 | 3.02E−10 |
| | (Seq. 2) | (seq. 1) | | | | | | | |
| DVD473 | VEGF | DLL4 | VEGF | DLL4 | L | L | 2.26E+05 | 1.61E−04 | 7.16E−10 |
| | (Seq. 2) | (seq. 1) | | | | | | | |
| DVD479 | VEGF | DLL4 | VEGF | DLL4 | L | S | 3.95E+05 | 1.74E−04 | 4.41E−10 |
| | (Seq. 2) | (seq. 1) | | | | | | | |
| DVD485 | VEGF | DLL4 | VEGF | DLL4 | S | L | 1.48E+05 | 1.71E−04 | 1.16E−09 |
| | (Seq. 2) | (seq. 1) | | | | | | | |
| DVD445 | VEGF | DLL4 | VEGF | DLL4 | S | S | 1.29E+05 | 6.46E−04 | 5.01E−09 |
| | (Seq. 2) | (seq. 2) | | | | | | | |
| DVD451 | VEGF | DLL4 | VEGF | DLL4 | L | L | 7.17E+04 | 1.00E−03 | 1.40E−08 |
| | (Seq. 2) | (seq. 2) | | | | | | | |
| DVD457 | VEGF | DLL4 | VEGF | DLL4 | L | S | 1.20E+05 | 5.78E−04 | 4.82E−09 |
| | (Seq. 2) | (seq. 2) | | | | | | | |
| DVD463 | VEGF | DLL4 | VEGF | DLL4 | S | L | 1.23E+05 | 4.72E−04 | 3.82E−09 |
| | (Seq. 2) | (seq. 2) | | | | | | | |
| DVD515 | VEGF | DLL4 | VEGF | DLL4 | S | S | 1.06E+06 | 1.60E−03 | 1.51E−09 |
| | (Seq. 2) | (seq. 3) | | | | | | | |
| DVD521 | VEGF | DLL4 | VEGF | DLL4 | L | L | 9.47E+05 | 1.68E−03 | 1.77E−09 |
| | (Seq. 2) | (seq. 3) | | | | | | | |
| DVD527 | VEGF | DLL4 | VEGF | DLL4 | L | S | 5.74E+05 | 1.09E−03 | 1.90E−09 |
| | (Seq. 2) | (seq. 3) | | | | | | | |
| DVD533 | VEGF | DLL4 | VEGF | DLL4 | S | L | 5.98E+05 | 1.33E−03 | 2.22E−09 |
| | (Seq. 2) | (seq. 3) | | | | | | | |
| DVD491 | VEGF | DLL4 | VEGF | DLL4 | S | S | 2.67E+05 | 6.35E−05 | 2.37E−10 |
| | (Seq. 2) | (seq. 4) | | | | | | | |
| DVD497 | VEGF | DLL4 | VEGF | DLL4 | L | L | 2.68E+05 | 7.12E−05 | 2.66E−10 |
| | (Seq. 2) | (seq. 4) | | | | | | | |
| DVD503 | VEGF | DLL4 | VEGF | DLL4 | L | S | 2.46E+05 | 4.72E−05 | 1.92E−10 |
| | (Seq. 2) | (seq. 4) | | | | | | | |
| DVD509 | VEGF | DLL4 | VEGF | DLL4 | S | L | 2.30E+05 | 3.52E−05 | 1.53E−10 |
| | (Seq. 2) | (seq. 4) | | | | | | | |
| DVD468 | VEGF | DLL4 | DLL4 | VEGF | S | S | 5.82E+04 | 2.19E−04 | 3.76E−09 |
| | (Seq. 2) | (seq. 1) | | | | | | | |
| DVD474 | VEGF | DLL4 | DLL4 | VEGF | L | L | 6.31E+04 | 6.55E−05 | 1.04E−09 |
| | (Seq. 2) | (seq. 1) | | | | | | | |
| DVD480 | VEGF | DLL4 | DLL4 | VEGF | L | S | 5.30E+04 | 1.79E−04 | 3.38E−09 |
| | (Seq. 2) | (seq. 1) | | | | | | | |
| DVD486 | VEGF | DLL4 | DLL4 | VEGF | S | L | 6.27E+04 | 1.33E−04 | 2.13E−09 |
| | (Seq. 2) | (seq. 1) | | | | | | | |
| DVD446 | VEGF | DLL4 | DLL4 | VEGF | S | S | 2.91E+04 | 1.69E−04 | 5.81E−09 |
| | (Seq. 2) | (seq. 2) | | | | | | | |
| DVD452 | VEGF | DLL4 | DLL4 | VEGF | L | L | 2.37E+04 | 2.20E−04 | 9.30E−09 |
| | (Seq. 2) | (seq. 2) | | | | | | | |
| DVD458 | VEGF | DLL4 | DLL4 | VEGF | L | S | 1.61E+04 | 2.61E−04 | 1.62E−08 |
| | (Seq. 2) | (seq. 2) | | | | | | | |
| DVD464 | VEGF | DLL4 | DLL4 | VEGF | S | L | 3.28E+04 | 1.82E−04 | 5.53E−09 |
| | (Seq. 2) | (seq. 2) | | | | | | | |
| DVD516 | VEGF | DLL4 | DLL4 | VEGF | S | S | 1.17E+05 | 5.83E−04 | 4.99E−09 |
| | (Seq. 2) | (seq. 3) | | | | | | | |
| DVD522 | VEGF | DLL4 | DLL4 | VEGF | L | L | 1.15E+05 | 1.21E−03 | 1.05E−08 |
| | (Seq. 2) | (seq. 3) | | | | | | | |
| DVD528 | VEGF | DLL4 | DLL4 | VEGF | L | S | 3.16E+05 | 1.52E−03 | 4.81E−09 |
| | (Seq. 2) | (seq. 3) | | | | | | | |
| DVD534 | VEGF | DLL4 | DLL4 | VEGF | S | L | 3.46E+05 | 2.00E−03 | 5.78E−09 |
| | (Seq. 2) | (seq. 3) | | | | | | | |
| DVD492 | VEGF | DLL4 | DLL4 | VEGF | S | S | 7.82E+04 | 8.35E−05 | 1.07E−09 |
| | (Seq. 2) | (seq. 4) | | | | | | | |
| DVD498 | VEGF | DLL4 | DLL4 | VEGF | L | L | 6.46E+04 | 9.36E−05 | 1.45E−09 |
| | (Seq. 2) | (seq. 4) | | | | | | | |
| DVD504 | VEGF | DLL4 | DLL4 | VEGF | L | S | 5.81E+04 | 7.32E−05 | 1.26E−09 |
| | (Seq. 2) | (seq. 4) | | | | | | | |
| DVD510 | VEGF | DLL4 | DLL4 | VEGF | S | L | 5.69E+04 | 8.84E−05 | 1.55E−09 |
| | (Seq. 2) | (seq. 4) | | | | | | | |
| DVD465 | VEGF | DLL4 | VEGF | DLL4 | S | S | 7.97E+05 | 1.64E−04 | 2.05E−10 |
| | (Seq. 3) | (seq. 1) | | | | | | | |
| DVD471 | VEGF | DLL4 | VEGF | DLL4 | L | L | 3.76E+05 | 2.52E−04 | 6.72E−10 |
| | (Seq. 3) | (seq. 1) | | | | | | | |
| DVD477 | VEGF | DLL4 | VEGF | DLL4 | L | S | 5.40E+05 | 1.65E−04 | 3.06E−10 |
| | (Seq. 3) | (seq. 1) | | | | | | | |
| DVD483 | VEGF | DLL4 | VEGF | DLL4 | S | L | 4.16E+05 | 1.39E−04 | 3.34E−10 |
| | (Seq. 3) | (seq. 1) | | | | | | | |
| DVD443 | VEGF | DLL4 | VEGF | DLL4 | S | S | 1.45E+05 | 5.96E−04 | 4.11E−09 |
| | (Seq. 3) | (seq. 2) | | | | | | | |
| DVD449 | VEGF | DLL4 | VEGF | DLL4 | L | L | 1.21E+05 | 5.84E−04 | 4.81E−09 |
| | (Seq. 3) | (seq. 2) | | | | | | | |
| DVD455 | VEGF | DLL4 | VEGF | DLL4 | L | S | 1.29E+05 | 6.04E−04 | 4.70E−09 |
| | (Seq. 3) | (seq. 2) | | | | | | | |
| DVD461 | VEGF | DLL4 | VEGF | DLL4 | S | L | 1.15E+05 | 5.38E−04 | 4.69E−09 |
| | (Seq. 3) | (seq. 2) | | | | | | | |
| DVD513 | VEGF | DLL4 | VEGF | DLL4 | S | S | 2.71E+05 | 6.77E−04 | 2.50E−09 |
| | (Seq. 3) | (seq. 3) | | | | | | | |
| DVD519 | VEGF | DLL4 | VEGF | DLL4 | L | L | 1.67E+05 | 4.72E−04 | 2.83E−09 |
| | (Seq. 3) | (seq. 3) | | | | | | | |
| DVD525 | VEGF | DLL4 | VEGF | DLL4 | L | S | 4.75E+05 | 1.22E−03 | 2.57E−09 |
| | (Seq. 3) | (seq. 3) | | | | | | | |
| DVD531 | VEGF | DLL4 | VEGF | DLL4 | S | L | 2.48E+05 | 8.58E−04 | 3.47E−09 |
| | (Seq. 3) | (seq. 3) | | | | | | | |
| DVD489 | VEGF | DLL4 | VEGF | DLL4 | S | S | 2.96E+05 | 8.38E−05 | 2.83E−10 |
| | (Seq. 3) | (seq. 4) | | | | | | | |
| DVD495 | VEGF | DLL4 | VEGF | DLL4 | L | L | 3.01E+05 | 7.91E−05 | 2.63E−10 |
| | (Seq. 3) | (seq. 4) | | | | | | | |
| DVD501 | VEGF | DLL4 | VEGF | DLL4 | L | S | 2.70E+05 | 8.14E−05 | 3.02E−10 |
| | (Seq. 3) | (seq. 4) | | | | | | | |
| DVD507 | VEGF | DLL4 | VEGF | DLL4 | S | L | 2.70E+05 | 7.16E−05 | 2.65E−10 |
| | (Seq. 3) | (seq. 4) | | | | | | | |
| DVD466 | VEGF | DLL4 | DLL4 | VEGF | S | S | 1.11E+05 | 1.39E−04 | 1.25E−09 |
| | (Seq. 3) | (seq. 1) | | | | | | | |
| DVD472 | VEGF | DLL4 | DLL4 | VEGF | L | L | 9.80E+04 | 8.64E−05 | 8.81E−10 |
| | (Seq. 3) | (seq. 1) | | | | | | | |
| DVD478 | VEGF | DLL4 | DLL4 | VEGF | L | S | 7.52E+04 | 1.67E−04 | 2.22E−09 |
| | (Seq. 3) | (seq. 1) | | | | | | | |
| DVD484 | VEGF | DLL4 | DLL4 | VEGF | S | L | 9.97E+04 | 2.95E−04 | 2.96E−09 |
| | (Seq. 3) | (seq. 1) | | | | | | | |
| DVD444 | VEGF | DLL4 | DLL4 | VEGF | S | S | 1.43E+05 | 3.40E−04 | 2.37E−09 |
| | (Seq. 3) | (seq. 2) | | | | | | | |
| DVD450 | VEGF | DLL4 | DLL4 | VEGF | L | L | 3.38E+04 | 2.51E−04 | 7.41E−09 |
| | (Seq. 3) | (seq. 2) | | | | | | | |
| DVD456 | VEGF | DLL4 | DLL4 | VEGF | L | S | 1.04E+05 | 1.74E−04 | 1.66E−09 |
| | (Seq. 3) | (seq. 2) | | | | | | | |
| DVD462 | VEGF | DLL4 | DLL4 | VEGF | S | L | 8.39E+04 | 2.50E−04 | 2.98E−09 |
| | (Seq. 3) | (seq. 2) | | | | | | | |
| DVD514 | VEGF | DLL4 | DLL4 | VEGF | S | S | 1.24E+05 | 4.32E−04 | 3.48E−09 |
| | (Seq. 3) | (seq. 3) | | | | | | | |
| DVD520 | VEGF | DLL4 | DLL4 | VEGF | L | L | 1.24E+05 | 4.08E−04 | 3.30E−09 |
| | (Seq. 3) | (seq. 3) | | | | | | | |
| DVD526 | VEGF | DLL4 | DLL4 | VEGF | L | S | 1.13E+05 | 6.29E−04 | 5.55E−09 |
| | (Seq. 3) | (seq. 3) | | | | | | | |
| DVD532 | VEGF | DLL4 | DLL4 | VEGF | S | L | 1.18E+05 | 8.10E−04 | 6.85E−09 |
| | (Seq. 3) | (seq. 3) | | | | | | | |
| DVD490 | VEGF | DLL4 | DLL4 | VEGF | S | S | 1.46E+05 | 7.70E−05 | 5.28E−10 |
| | (Seq. 3) | (seq. 4) | | | | | | | |
| DVD496 | VEGF | DLL4 | DLL4 | VEGF | L | L | 1.20E+05 | 1.72E−04 | 1.44E−09 |
| | (Seq. 3) | (seq. 4) | | | | | | | |
| DVD502 | VEGF | DLL4 | DLL4 | VEGF | L | S | 9.21E+04 | 7.43E−05 | 8.07E−10 |
| | (Seq. 3) | (seq. 4) | | | | | | | |
| DVD508 | VEGF | DLL4 | DLL4 | VEGF | S | L | 9.84E+04 | 1.67E−04 | 1.70E−09 |
| | (Seq. 3) | (seq. 4) | | | | | | | |

[0639] Binding of VEGF/DLL4 DVD-Ig constructs to DLL4 as characterized by Biacore technology was comparable to that of parent antibodies. All N- or C-terminal variable domains bound DLL4 with affinity comparable to that of the parent antibodies.

TABLE 21
BIACORE Analysis of VEGF domain in VEGF/DLL4 DVD Constructs

| | | DLL4 | C- | N- | | | | | |
|---|---|---|---|---|---|---|---|---|---|
| DVD-Ig | VEGF | Seq. | Term. | Term. | HC | LC | | VEGF | VEGF |
| ID | Seq. ID | ID | VD | VD | linker | linker | VEGF ka | kd | KD |
| DVD044 | VEGF | DLL4 | VEGF | DLL4 | S | S | 3.67E+05 | 2.41E−04 | 6.57E−10 |
| | (Seq. 1) | (seq. 1) | | | | | | | |
| DVD469 | VEGF | DLL4 | VEGF | DLL4 | L | L | 3.31E+07 | 1.51E−02 | 4.55E−10 |
| | (Seq. 1) | (seq. 1) | | | | | | | |
| DVD475 | VEGF | DLL4 | VEGF | DLL4 | L | S | 2.86E+05 | 2.40E−04 | 8.38E−10 |
| | (Seq. 1) | (seq. 1) | | | | | | | |
| DVD481 | VEGF | DLL4 | VEGF | DLL4 | S | L | 4.76E+05 | 5.73E−04 | 1.20E−09 |
| | (Seq. 1) | (seq. 1) | | | | | | | |
| DVD441 | VEGF | DLL4 | VEGF | DLL4 | S | S | 1.33E+05 | 7.43E−05 | 5.58E−10 |
| | (Seq. 1) | (seq. 2) | | | | | | | |
| DVD447 | VEGF | DLL4 | VEGF | DLL4 | L | L | 2.99E+05 | 4.76E−05 | 1.59E−10 |
| | (Seq. 1) | (seq. 2) | | | | | | | |
| DVD453 | VEGF | DLL4 | VEGF | DLL4 | L | S | 1.58E+05 | 2.62E−07 | 1.66E−12 |
| | (Seq. 1) | (seq. 2) | | | | | | | |
| DVD459 | VEGF | DLL4 | VEGF | DLL4 | S | L | 3.60E+05 | 5.66E−07 | 1.57E−12 |
| | (Seq. 1) | (seq. 2) | | | | | | | |
| DVD511 | VEGF | DLL4 | VEGF | DLL4 | S | S | 3.66E+05 | 3.70E−04 | 1.01E−09 |
| | (Seq. 1) | (seq. 3) | | | | | | | |
| DVD517 | VEGF | DLL4 | VEGF | DLL4 | L | L | 5.33E+05 | 3.03E−04 | 5.69E−10 |
| | (Seq. 1) | (seq. 3) | | | | | | | |
| DVD523 | VEGF | DLL4 | VEGF | DLL4 | L | S | 5.73E+05 | 1.75E−04 | 3.05E−10 |
| | (Seq. 1) | (seq. 3) | | | | | | | |
| DVD529 | VEGF | DLL4 | VEGF | DLL4 | S | L | 5.61E+05 | 1.86E−04 | 3.32E−10 |
| | (Seq. 1) | (seq. 3) | | | | | | | |
| DVD487 | VEGF | DLL4 | VEGF | DLL4 | S | S | 3.15E+05 | 1.04E−04 | 3.30E−10 |
| | (Seq. 1) | (seq. 4) | | | | | | | |
| DVD493 | VEGF | DLL4 | VEGF | DLL4 | L | L | 7.54E+05 | 2.09E−05 | 2.77E−11 |
| | (Seq. 1) | (seq. 4) | | | | | | | |
| DVD499 | VEGF | DLL4 | VEGF | DLL4 | L | S | 3.40E+05 | 3.95E−05 | 1.16E−10 |
| | (Seq. 1) | (seq. 4) | | | | | | | |
| DVD505 | VEGF | DLL4 | VEGF | DLL4 | S | L | 7.00E+05 | 6.05E−08 | 8.64E−14 |
| | (Seq. 1) | (seq. 4) | | | | | | | |
| DVD043 | VEGF | DLL4 | DLL4 | VEGF | S | S | 1.68E+06 | 1.25E−04 | 7.46E−11 |
| | (Seq. 1) | (seq. 1) | | | | | | | |
| DVD470 | VEGF | DLL4 | DLL4 | VEGF | L | L | 1.20E+06 | 2.40E−04 | 2.01E−10 |
| | (Seq. 1) | (seq. 1) | | | | | | | |
| DVD476 | VEGF | DLL4 | DLL4 | VEGF | L | S | 1.69E+06 | 4.74E−05 | 2.81E−11 |
| | (Seq. 1) | (seq. 1) | | | | | | | |
| DVD482 | VEGF | DLL4 | DLL4 | VEGF | S | L | 6.87E+05 | 1.38E−04 | 2.00E−10 |
| | (Seq. 1) | (seq. 1) | | | | | | | |
| DVD442 | VEGF | DLL4 | DLL4 | VEGF | S | S | 1.93E+06 | 1.70E−04 | 8.80E−11 |
| | (Seq. 1) | (seq. 2) | | | | | | | |
| DVD448 | VEGF | DLL4 | DLL4 | VEGF | L | L | 5.04E+05 | 1.36E−04 | 2.71E−10 |
| | (Seq. 1) | (seq. 2) | | | | | | | |
| DVD454 | VEGF | DLL4 | DLL4 | VEGF | L | S | 1.59E+06 | 1.26E−04 | 7.90E−11 |
| | (Seq. 1) | (seq. 2) | | | | | | | |
| DVD460 | VEGF | DLL4 | DLL4 | VEGF | S | L | 1.32E+06 | 2.28E−04 | 1.74E−10 |
| | (Seq. 1) | (seq. 2) | | | | | | | |
| DVD512 | VEGF | DLL4 | DLL4 | VEGF | S | S | 9.39E+05 | 1.43E−04 | 1.53E−10 |
| | (Seq. 1) | (seq. 3) | | | | | | | |
| DVD518 | VEGF | DLL4 | DLL4 | VEGF | L | L | 2.88E+08 | 1.25E−01 | 4.34E−10 |
| | (Seq. 1) | (seq. 3) | | | | | | | |
| DVD524 | VEGF | DLL4 | DLL4 | VEGF | L | S | 1.67E+06 | 1.88E−04 | 1.13E−10 |
| | (Seq. 1) | (seq. 3) | | | | | | | |
| DVD530 | VEGF | DLL4 | DLL4 | VEGF | S | L | 1.26E+06 | 1.71E−04 | 1.36E−10 |
| | (Seq. 1) | (seq. 3) | | | | | | | |
| DVD488 | VEGF | DLL4 | DLL4 | VEGF | S | S | 6.99E+05 | 3.74E−04 | 5.36E−10 |
| | (Seq. 1) | (seq. 4) | | | | | | | |
| DVD494 | VEGF | DLL4 | DLL4 | VEGF | L | L | 3.11E+07 | 1.76E−02 | 5.66E−10 |
| | (Seq. 1) | (seq. 4) | | | | | | | |
| DVD500 | VEGF | DLL4 | DLL4 | VEGF | L | S | 4.92E+05 | 2.48E−04 | 5.04E−10 |
| | (Seq. 1) | (seq. 4) | | | | | | | |
| DVD506 | VEGF | DLL4 | DLL4 | VEGF | S | L | 6.06E+05 | 1.71E−04 | 2.81E−10 |
| | (Seq. 1) | (seq. 4) | | | | | | | |
| DVD467 | VEGF | DLL4 | VEGF | DLL4 | S | S | 1.77E+05 | 2.36E−04 | 1.33E−09 |
| | (Seq. 2) | (seq. 1) | | | | | | | |
| DVD473 | VEGF | DLL4 | VEGF | DLL4 | L | L | 2.09E+05 | 2.65E−04 | 1.27E−09 |
| | (Seq. 2) | (seq. 1) | | | | | | | |
| DVD479 | VEGF | DLL4 | VEGF | DLL4 | L | S | 2.99E+05 | 2.57E−04 | 8.60E−10 |
| | (Seq. 2) | (seq. 1) | | | | | | | |
| DVD485 | VEGF | DLL4 | VEGF | DLL4 | S | L | 1.22E+05 | 4.54E−05 | 3.72E−10 |
| | (Seq. 2) | (seq. 1) | | | | | | | |
| DVD445 | VEGF | DLL4 | VEGF | DLL4 | S | S | 6.64E+09 | 1.80E+00 | 2.72E−10 |
| | (Seq. 2) | (seq. 2) | | | | | | | |
| DVD451 | VEGF | DLL4 | VEGF | DLL4 | L | L | 9.22E+04 | 1.06E−06 | 1.15E−11 |
| | (Seq. 2) | (seq. 2) | | | | | | | |
| DVD457 | VEGF | DLL4 | VEGF | DLL4 | L | S | 1.77E+05 | 5.43E−05 | 3.07E−10 |
| | (Seq. 2) | (seq. 2) | | | | | | | |
| DVD463 | VEGF | DLL4 | VEGF | DLL4 | S | L | 6.21E+05 | 4.79E−04 | 7.71E−10 |
| | (Seq. 2) | (seq. 2) | | | | | | | |
| DVD515 | VEGF | DLL4 | VEGF | DLL4 | S | S | 4.05E+05 | 5.85E−04 | 1.45E−09 |
| | (Seq. 2) | (seq. 3) | | | | | | | |
| DVD521 | VEGF | DLL4 | VEGF | DLL4 | L | L | 6.66E+05 | 5.88E−04 | 8.82E−10 |
| | (Seq. 2) | (seq. 3) | | | | | | | |
| DVD527 | VEGF | DLL4 | VEGF | DLL4 | L | S | 5.29E+05 | 4.46E−04 | 8.42E−10 |
| | (Seq. 2) | (seq. 3) | | | | | | | |
| DVD533 | VEGF | DLL4 | VEGF | DLL4 | S | L | 6.08E+05 | 5.01E−04 | 8.25E−10 |
| | (Seq. 2) | (seq. 3) | | | | | | | |
| DVD491 | VEGF | DLL4 | VEGF | DLL4 | S | S | 3.40E+05 | 2.45E−04 | 7.20E−10 |
| | (Seq. 2) | (seq. 4) | | | | | | | |
| DVD497 | VEGF | DLL4 | VEGF | DLL4 | L | L | 1.25E+05 | 8.37E−05 | 6.68E−10 |
| | (Seq. 2) | (seq. 4) | | | | | | | |
| DVD503 | VEGF | DLL4 | VEGF | DLL4 | L | S | 2.26E+05 | 1.05E−04 | 4.66E−10 |
| | (Seq. 2) | (seq. 4) | | | | | | | |
| DVD509 | VEGF | DLL4 | VEGF | DLL4 | S | L | 1.28E+05 | 7.83E−06 | 6.13E−11 |
| | (Seq. 2) | (seq. 4) | | | | | | | |
| DVD468 | VEGF | DLL4 | DLL4 | VEGF | S | S | 1.18E+05 | 1.74E−07 | 1.48E−12 |
| | (Seq. 2) | (seq. 1) | | | | | | | |
| DVD474 | VEGF | DLL4 | DLL4 | VEGF | L | L | 1.36E+05 | 1.96E−07 | 1.44E−12 |
| | (Seq. 2) | (seq. 1) | | | | | | | |
| DVD480 | VEGF | DLL4 | DLL4 | VEGF | L | S | 1.62E+05 | 4.91E−05 | 3.02E−10 |
| | (Seq. 2) | (seq. 1) | | | | | | | |
| DVD486 | VEGF | DLL4 | DLL4 | VEGF | S | L | 1.54E+05 | 5.72E−05 | 3.71E−10 |
| | (Seq. 2) | (seq. 1) | | | | | | | |
| DVD446 | VEGF | DLL4 | DLL4 | VEGF | S | S | 1.22E+05 | 3.62E−08 | 2.97E−13 |
| | (Seq. 2) | (seq. 2) | | | | | | | |
| DVD452 | VEGF | DLL4 | DLL4 | VEGF | L | L | 1.04E+05 | 1.61E−08 | 1.55E−13 |
| | (Seq. 2) | (seq. 2) | | | | | | | |
| DVD458 | VEGF | DLL4 | DLL4 | VEGF | L | S | 1.21E+05 | 3.39E−08 | 2.81E−13 |
| | (Seq. 2) | (seq. 2) | | | | | | | |
| DVD464 | VEGF | DLL4 | DLL4 | VEGF | S | L | 9.37E+04 | 7.22E−08 | 7.70E−13 |
| | (Seq. 2) | (seq. 2) | | | | | | | |
| DVD516 | VEGF | DLL4 | DLL4 | VEGF | S | S | 3.58E+05 | 2.80E−04 | 7.81E−10 |
| | (Seq. 2) | (seq. 3) | | | | | | | |
| DVD522 | VEGF | DLL4 | DLL4 | VEGF | L | L | 4.89E+05 | 2.20E−04 | 4.50E−10 |
| | (Seq. 2) | (seq. 3) | | | | | | | |
| DVD528 | VEGF | DLL4 | DLL4 | VEGF | L | S | 3.88E+05 | 1.60E−04 | 4.13E−10 |
| | (Seq. 2) | (seq. 3) | | | | | | | |
| DVD534 | VEGF | DLL4 | DLL4 | VEGF | S | L | 3.74E+05 | 1.68E−04 | 4.49E−10 |
| | (Seq. 2) | (seq. 3) | | | | | | | |
| DVD492 | VEGF | DLL4 | DLL4 | VEGF | S | S | 1.52E+05 | 7.60E−06 | 4.99E−11 |
| | (Seq. 2) | (seq. 4) | | | | | | | |
| DVD498 | VEGF | DLL4 | DLL4 | VEGF | L | L | 1.62E+05 | 2.85E−05 | 1.76E−10 |
| | (Seq. 2) | (seq. 4) | | | | | | | |
| DVD504 | VEGF | DLL4 | DLL4 | VEGF | L | S | 1.62E+05 | 1.52E−07 | 9.41E−13 |
| | (Seq. 2) | (seq. 4) | | | | | | | |
| DVD510 | VEGF | DLL4 | DLL4 | VEGF | S | L | 1.64E+05 | 1.20E−05 | 7.33E−11 |
| | (Seq. 2) | (seq. 4) | | | | | | | |
| DVD465 | VEGF | DLL4 | VEGF | DLL4 | S | S | 3.48E+05 | 4.14E−04 | 1.19E−09 |
| | (Seq. 3) | (seq. 1) | | | | | | | |
| DVD471 | VEGF | DLL4 | VEGF | DLL4 | L | L | 2.53E+05 | 2.32E−04 | 9.17E−10 |
| | (Seq. 3) | (seq. 1) | | | | | | | |
| DVD477 | VEGF | DLL4 | VEGF | DLL4 | L | S | 2.49E+05 | 2.54E−04 | 1.02E−09 |
| | (Seq. 3) | (seq. 1) | | | | | | | |
| DVD483 | VEGF | DLL4 | VEGF | DLL4 | S | L | 9.05E+05 | 8.72E−04 | 9.63E−10 |
| | (Seq. 3) | (seq. 1) | | | | | | | |
| DVD443 | VEGF | DLL4 | VEGF | DLL4 | S | S | 1.57E+05 | 2.67E−04 | 1.71E−09 |
| | (Seq. 3) | (seq. 2) | | | | | | | |
| DVD449 | VEGF | DLL4 | VEGF | DLL4 | L | L | 2.30E+05 | 2.08E−04 | 9.03E−10 |
| | (Seq. 3) | (seq. 2) | | | | | | | |
| DVD455 | VEGF | DLL4 | VEGF | DLL4 | L | S | 1.77E+05 | 8.15E−05 | 4.60E−10 |
| | (Seq. 3) | (seq. 2) | | | | | | | |
| DVD461 | VEGF | DLL4 | VEGF | DLL4 | S | L | 2.69E+05 | 2.02E−04 | 7.50E−10 |
| | (Seq. 3) | (seq. 2) | | | | | | | |
| DVD513 | VEGF | DLL4 | VEGF | DLL4 | S | S | 4.00E+05 | 4.97E−04 | 1.24E−09 |
| | (Seq. 3) | (seq. 3) | | | | | | | |
| DVD519 | VEGF | DLL4 | VEGF | DLL4 | L | L | 2.35E+07 | 5.22E−03 | 2.23E−10 |
| | (Seq. 3) | (seq. 3) | | | | | | | |
| DVD525 | VEGF | DLL4 | VEGF | DLL4 | L | S | 1.08E+06 | 4.83E−04 | 4.47E−10 |
| | (Seq. 3) | (seq. 3) | | | | | | | |
| DVD531 | VEGF | DLL4 | VEGF | DLL4 | S | L | 7.56E+05 | 4.42E−04 | 5.84E−10 |
| | (Seq. 3) | (seq. 3) | | | | | | | |
| DVD489 | VEGF | DLL4 | VEGF | DLL4 | S | S | 2.07E+05 | 3.65E−04 | 1.76E−09 |
| | (Seq. 3) | (seq. 4) | | | | | | | |
| DVD495 | VEGF | DLL4 | VEGF | DLL4 | L | L | 3.16E+05 | 2.04E−04 | 6.45E−10 |
| | (Seq. 3) | (seq. 4) | | | | | | | |
| DVD501 | VEGF | DLL4 | VEGF | DLL4 | L | S | 2.13E+05 | 1.75E−04 | 8.21E−10 |
| | (Seq. 3) | (seq. 4) | | | | | | | |
| DVD507 | VEGF | DLL4 | VEGF | DLL4 | S | L | 2.38E+05 | 2.01E−04 | 8.47E−10 |
| | (Seq. 3) | (seq. 4) | | | | | | | |
| DVD466 | VEGF | DLL4 | DLL4 | VEGF | S | S | 5.53E+05 | 3.93E−04 | 7.10E−10 |
| | (Seq. 3) | (seq. 1) | | | | | | | |
| DVD472 | VEGF | DLL4 | DLL4 | VEGF | L | L | 1.20E+06 | 2.40E−04 | 2.01E−10 |
| | (Seq. 3) | (seq. 1) | | | | | | | |
| DVD478 | VEGF | DLL4 | DLL4 | VEGF | L | S | 5.52E+05 | 1.95E−04 | 3.54E−10 |
| | (Seq. 3) | (seq. 1) | | | | | | | |
| DVD484 | VEGF | DLL4 | DLL4 | VEGF | S | L | 1.61E+07 | 4.10E−03 | 2.55E−10 |
| | (Seq. 3) | (seq. 1) | | | | | | | |
| DVD444 | VEGF | DLL4 | DLL4 | VEGF | S | S | 2.35E+07 | 3.80E−03 | 1.62E−10 |
| | (Seq. 3) | (seq. 2) | | | | | | | |
| DVD450 | VEGF | DLL4 | DLL4 | VEGF | L | L | 1.69E+07 | 4.31E−03 | 2.55E−10 |
| | (Seq. 3) | (seq. 2) | | | | | | | |
| DVD456 | VEGF | DLL4 | DLL4 | VEGF | L | S | 1.60E+07 | 4.48E−03 | 2.81E−10 |
| | (Seq. 3) | (seq. 2) | | | | | | | |
| DVD462 | VEGF | DLL4 | DLL4 | VEGF | S | L | 9.93E+05 | 8.58E−04 | 8.64E−10 |
| | (Seq. 3) | (seq. 2) | | | | | | | |
| DVD514 | VEGF | DLL4 | DLL4 | VEGF | S | S | 5.41E+05 | 5.49E−04 | 1.01E−09 |
| | (Seq. 3) | (seq. 3) | | | | | | | |
| DVD520 | VEGF | DLL4 | DLL4 | VEGF | L | L | 1.18E+06 | 9.61E−04 | 8.17E−10 |
| | (Seq. 3) | (seq. 3) | | | | | | | |
| DVD526 | VEGF | DLL4 | DLL4 | VEGF | L | S | 1.19E+06 | 8.01E−04 | 6.75E−10 |
| | (Seq. 3) | (seq. 3) | | | | | | | |
| DVD532 | VEGF | DLL4 | DLL4 | VEGF | S | L | 4.47E+07 | 1.23E−02 | 2.76E−10 |
| | (Seq. 3) | (seq. 3) | | | | | | | |
| DVD490 | VEGF | DLL4 | DLL4 | VEGF | S | S | 8.94E+05 | 1.69E−04 | 1.89E−10 |
| | (Seq. 3) | (seq. 4) | | | | | | | |
| DVD496 | VEGF | DLL4 | DLL4 | VEGF | L | L | 2.12E+07 | 6.58E−03 | 3.11E−10 |
| | (Seq. 3) | (seq. 4) | | | | | | | |
| DVD502 | VEGF | DLL4 | DLL4 | VEGF | L | S | 8.71E+05 | 2.31E−04 | 2.65E−10 |
| | (Seq. 3) | (seq. 4) | | | | | | | |
| DVD508 | VEGF | DLL4 | DLL4 | VEGF | S | L | 1.31E+06 | 2.13E−04 | 1.62E−10 |
| | (Seq. 3) | (seq. 4) | | | | | | | |

[0640] Binding of VEGF/DLL4 DVD-Ig constructs to VEGF as characterized by Biacore technology was comparable to that of parent antibodies. All N- or C-terminal variable domains bound VEGF with affinity comparable to that of the parent antibodies.

### Example 1.1.2

### Assays Used to Determine the Functional Activity of Parent Antibodies and DVD-Ig

### Example 1.1.2.A

### Cytokine Bioassay

[0641] The ability of an anti-cytokine or an anti-growth factor parent antibody or DVD-Ig containing anti-cytokine or anti-growth factor sequences to inhibit or neutralize a target cytokine or growth factor bioactivity is analyzed by determining the inhibitory potential of the antibody or DVD-Ig. For example, the ability of an anti-IL-4 antibody to inhibit IL-4 mediated IgE production may be used. For example, human naive B cells are isolated from peripheral blood, respectively, buffy coats by Ficoll-paque density centrifugation, followed by magnetic separation with MACS beads (Miltenyi Biotec, Bergisch Gladbach, Germany) specific for human sIgD FITC labeled goat F(ab)2 antibodies followed by anti-FITC MACS beads. Magnetically sorted naive B cells are adjusted to 3×10⁵ cells per ml in XV15 and plated out in 100 μl per well of 96-well plates in a 6×6 array in the center of the plate, surrounded by PBS filled wells during the 10 days of culture at 37° C. in the presence of 5% CO₂. One plate each is prepared per antibody to be tested, consisting of 3 wells each of un-induced and induced controls and quintuplicate repeats of antibody titrations starting at 7 μg/ml and running in 3-fold dilution down to 29 ng/ml final concentrations added in 50 μl four times concentrated pre-dilution. To induce IgE production, rhIL-4 at 20 ng/ml plus anti-CD40 monoclonal antibody (Novartis, Basel, Switzerland) at 0.5 μg/ml final concentrations in 50 μl each are added to each well, and IgE concentrations are determined at the end of the culture period by a standard sandwich ELISA method.

### Example 1.1.2.B

### Cytokine Release Assay

[0642] The ability of a parent antibody or DVD-Ig to cause cytokine release is analyzed. Peripheral blood is withdrawn from three healthy donors by venipuncture into heparized vacutainer tubes. Whole blood is diluted 1:5 with RPMI-1640 medium and placed in 24-well tissue culture plates at 0.5 mL per well. The anti-cytokine antibodies (e.g., anti-IL-4) are diluted into RPMI-1640 and placed in the plates at 0.5 mL/well to give final concentrations of 200, 100, 50, 10, and 1 μg/mL. The final dilution of whole blood in the culture plates is 1:10. LPS and PHA are added to separate wells at 2 μg/mL and 5 μg/mL final concentration as a positive control for cytokine release. Polyclonal human IgG is used as negative control antibody. The experiment is performed in duplicate. Plates are incubated at 37° C. at 5% CO₂. Twenty-four hours later the contents of the wells are transferred into test tubes and spun for 5 minutes at 1200 rpm. Cell-free supernatants are collected and frozen for cytokine assays. Cells left over on the plates and in the tubes are lysed with 0.5 mL of lysis solution, and placed at −20° C. and thawed. 0.5 mL of medium is added (to bring the volume to the same level as the cell-free supernatant samples) and the cell preparations are collected and frozen for cytokine assays. Cell-free supernatants and cell lysates are assayed for cytokine levels by ELISA, for example, for levels of IL-8, IL-6, IL-1β, IL-1RA, or TNF-α.

### Example 1.1.2.C

### Cytokine Cross-Reactivity Study

[0643] The ability of an anti-cytokine parent antibody or DVD-Ig directed to a cytokine(s) of interest to cross react with other cytokines is analyzed. Parent antibodies or DVD-Ig are immobilized on a Biacore biosensor matrix. An anti-human Fc mAb is covalently linked via free amine groups to the dextran matrix by first activating carboxyl groups on the matrix with 100 mM N-hydroxysuccinimide (NHS) and 400 mM N-Ethyl-N′-(3-dimethylaminopropyl)-carbodiimide hydrochloride (EDC). Approximately 50 μL of each antibody or DVD-Ig preparation at a concentration of 25 μg/mL, diluted in sodium acetate, pH 4.5, is injected across the activated biosensor and free amines on the protein are bound directly to the activated carboxyl groups. Typically, 5000 Resonance Units (RU's) are immobilized. Unreacted matrix EDC-esters are deactivated by an injection of 1 M ethanolamine. A second flow cell is prepared as a reference standard by immobilizing human IgG1/K using the standard amine coupling kit. SPR measurements are performed using the CM biosensor chip. All antigens to be analyzed on the biosensor surface are diluted in HBS-EP running buffer containing 0.01% P20.

[0644] To examine the cytokine binding specificity, excess cytokine of interest (100 nM, e.g., soluble recombinant human) is injected across the anti-cytokine parent antibody or DVD-Ig immobilized biosensor surface (5 minute contact time). Before injection of the cytokine of interest and immediately afterward, HBS-EP buffer alone flows through each flow cell. The net difference in the signals between the baseline and the point corresponding to approximately 30 seconds after completion of cytokine injection are taken to represent the final binding value. Again, the response is measured in Resonance Units. Biosensor matrices are regenerated using 10 mM HCl before injection of the next sample where a binding event is observed, otherwise running buffer was injected over the matrices. Human cytokines (e.g., IL-1α, IL-1β, IL-2, IL-3, IL-4, IL-5, IL-6, IL-7, IL-8, IL-9, IL-10, IL-11, IL-12, IL-13, IL-15, IL-16, IL-17, IL-18, IL-19, IL-20, IL-22, IL-23, IL-27, TNF-α, TNF-β, and IFN-γ, for example) are also simultaneously injected over the immobilized mouse IgG1/K reference surface to record any nonspecific binding background. By preparing a reference and reaction surface, Biacore can automatically subtract the reference surface data from the reaction surface data in order to eliminate the majority of the refractive index change and injection noise. Thus, it is possible to ascertain the true binding response attributed to an anti-cytokine antibody or DVD-Ig binding reaction.

[0645] When a cytokine of interest is injected across immobilized anti-cytokine antibody, significant binding is observed. 10 mM HCl regeneration completely removes all non-covalently associated proteins. Examination of the sensorgram shows that immobilized anti-cytokine antibody or DVD-Ig binding to soluble cytokine is strong and robust. After confirming the expected result with the cytokine of interest, the panel of remaining recombinant human cytokines is tested, for each antibody or DVD-Ig separately. The amount of anti-cytokine antibody or DVD-Ig bound or unbound cytokine for each injection cycle is recorded. The results from three independent experiments are used to determine the specificity profile of each antibody or DVD-Ig. Antibodies or DVD-Ig with the expected binding to the cytokine of interest and no binding to any other cytokine are selected.

### Example 1.1.2.D

### Tissue Cross Reactivity

[0646] Tissue cross reactivity studies are done in three stages, with the first stage including cryosections of 32 tissues, second stage including up to 38 tissues, and the 3^{rd} stage including additional tissues from 3 unrelated adults as described below. Studies are done typically at two dose levels.

[0647] Stage 1: Cryosections (about 5 μm) of human tissues (32 tissues (typically: Adrenal Gland, Gastrointestinal Tract, Prostate, Bladder, Heart, Skeletal Muscle, Blood Cells, Kidney, Skin, Bone Marrow, Liver, Spinal Cord, Breast, Lung, Spleen, Cerebellum, Lymph Node, Testes, Cerebral Cortex, Ovary, Thymus, Colon, Pancreas, Thyroid, Endothelium, Parathyroid, Ureter, Eye, Pituitary, Uterus, Fallopian Tube and Placenta) from one human donor obtained at autopsy or biopsy) are fixed and dried on object glass. The peroxidase staining of tissue sections is performed, using the avidin-biotin system.

[0648] Stage 2: Cryosections (about 5 μm) of human tissues 38 tissues (including adrenal, blood, blood vessel, bone marrow, cerebellum, cerebrum, cervix, esophagus, eye, heart, kidney, large intestine, liver, lung, lymph node, breast mammary gland, ovary, oviduct, pancreas, parathyroid, peripheral nerve, pituitary, placenta, prostate, salivary gland, skin, small intestine, spinal cord, spleen, stomach, striated muscle, testis, thymus, thyroid, tonsil, ureter, urinary bladder, and uterus) from 3 unrelated adults obtained at autopsy or biopsy) are fixed and dried on object glass. The peroxidase staining of tissue sections is performed, using the avidin-biotin system.

[0649] Stage 3: Cryosections (about 5 μm) of cynomolgus monkey tissues (38 tissues (including adrenal, blood, blood vessel, bone marrow, cerebellum, cerebrum, cervix, esophagus, eye, heart, kidney, large intestine, liver, lung, lymph node, breast mammary gland, ovary, oviduct, pancreas, parathyroid, peripheral nerve, pituitary, placenta, prostate, salivary gland, skin, small intestine, spinal cord, spleen, stomach, striated muscle, testis, thymus, thyroid, tonsil, ureter, urinary bladder, and uterus) from 3 unrelated adult monkeys obtained at autopsy or biopsy) are fixed and dried on object glass. The peroxidase staining of tissue sections is performed, using the avidin-biotin system.

[0650] The antibody or DVD-Ig is incubated with the secondary biotinylated anti-human IgG and developed into immune complex. The immune complex at the final concentrations of 2 and 10 μg/mL of antibody or DVD-Ig is added onto tissue sections on object glass and then the tissue sections are reacted for 30 minutes with a avidin-biotin-peroxidase kit. Subsequently, DAB (3,3′-diaminobenzidine), a substrate for the peroxidase reaction, is applied for 4 minutes for tissue staining. Antigen-Sepharose beads are used as positive control tissue sections. Target antigen and human serum blocking studies serve as additional controls. The immune complex at the final concentrations of 2 and 10 μg/mL of antibody or DVD-Ig is pre-incubated with target antigen (final concentration of 100 μg/ml) or human serum (final concentration 10%) for 30 minutes, and then added onto the tissue sections on object glass and then the tissue sections are reacted for 30 minutes with a avidin-biotin-peroxidase kit. Subsequently, DAB (3,3′-diaminobenzidine), a substrate for the peroxidase reaction, is applied for 4 minutes for tissue staining.

[0651] Any specific staining is judged to be either an expected (e.g., consistent with antigen expression) or unexpected reactivity based upon known expression of the target antigen in question. Any staining judged specific is scored for intensity and frequency. The tissue staining between stage 2 (human tissue) and stage 3 (cynomolgus monkey tissue) is either judged to be similar or different.

### Example 1.1.2.E

### Inhibition of HUVEC Proliferation/Survival by VEGF Parent Antibody and DVD-Ig Constructs

[0652] Prior to plating for the assay, normal human umbilical vascular endothelial cells or HUVEC (passage 2-6) were maintained in EBM-2 (Lonza-Clonetics, Walkersville, Md.) supplemented with EGM-2 SingleQuots (Lonza-Clonetics, Walkersville, Md., #CC-4176). HUVEC cells were plated at 10,000 cells/well on collagen coated black 96-well plates in (100 μl) EMB-2 with 0.1% FBS in the absence of growth factors. The following day the media was replaced with 0.1% FBS in the absence of growth factors. The following day the media was replaced with 100 μl of EMB-2 (without growth factors or serum) and incubated for four hours prior to the addition of VEGF and antibodies/DVD-Igs. Anti-VEGF monoclonal antibodies or DVD-Igs (at final concentrations of 67 nM, 6.7 nM and 0.67 nM) were diluted in EMB-2 with 0.1% BSA and were pre-incubated with recombinant human VEGF₁₆₅ (50 ng/ml) for 1 hour at 25° C. in 504 Antibody/DVD-Ig and VEGF mixtures were then added to the cells (50 μl), and the plates were incubated at 37° C. in a humidified, 5% CO₂ atmosphere for 72 hours. Cell survival/proliferation was measured indirectly by assessing ATP levels using an ATPlite kit (Perkin Elmer, Waltham, Mass.) according to the manufacturer's instructions. Table 22 provides the data showing inhibition of HUVEC proliferation/survival.

TABLE 22
Inhibition Of HUVEC Proliferation/Survival By VEGF Parent Antibody And
DVD-Ig Constructs

| | | | N-terminal VD | C-terminal VD |
|---|---|---|---|---|
| | | | inhibition of | inhibition of |
| | | | HUVEC | HUVEC |
| | | | proliferation | proliferation |
| | N-terminal | C-terminal | (% inhibition at | (% inhibition at |
| Parent | Variable | Variable | 67, 6.7 and | 67, 6.7 and |
| Antibody or | Domain | Domain | 0.67 nM Ab/DVD- | 0.67 nM Ab/DVD- |
| DVD-Ig ID | (VD) | (VD) | Ig) | Ig) |
| AB014 | VEGF | | 67 nM = 98%, 6.7 nM = 91%, 0.67 nM = 12% | |
| DVD038 | HER-2 | VEGF | | 67 nM = 45%, |
| | | | | 6.7 nM = −18%, |
| | | | | 0.67 nM = −22% |
| AB014 | VEGF | | 67 nM = 98%, 6.7 nM = 91%, 0.67 nM = 12% | |
| DVD044 | DLL4 | VEGF | | 67 nM = 99%, |
| | | | | 6.7 nM = 19%, |
| | | | | 0.67 nM = 6% |
| DVD043 | VEGF | DLL4 | 67 nM = 89%, | |
| | | | 6.7 nM = 51%, | |
| | | | 0.67 nM = −22% | |
| AB014 | VEGF | | 67 nM = 97%, 6.7 nM = 91%, 0.67 nM = 62% | |
| DVD048 | RON | VEGF | | 67 nM = 91%, |
| | | | | 6.7 nM = 88%, |
| | | | | 0.67 nM = 62% |
| DVD047 | VEGF | RON | 67 nM = 65%, | |
| | | | 6.7 nM = 31%, | |
| | | | 0.67 nM = −5% | |
| AB014 | VEGF | | 67 nM = 97%, 6.7 nM = 91%, 0.67 nM = 62% | |
| DVD049 | VEGF | NRP1 | 67 nM = 108%, | |
| | | | 6.7 nM = 86%, | |
| | | | 0.67 nM = 43% | |
| DVD050 | NRP1 | VEGF | | 67 nM = 103%, |
| | | | | 6.7 nM = 74%, |
| | | | | 0.67 nM = 15% |

| | | |
|---|---|---|
| AB014 | VEGF | 67 nM = 98%, 6.7 nM = 91%, 0.67 nM = 12% |

| | | | |
|---|---|---|---|
| DVD260 | PlGF | VEGF | 67 nM = 51%, |
| | | | 6.7 nM = 7%, |
| | | | 0.67 nM = −16% |

[0653] All DVD-Igs containing VDs from AB014 inhibited HUVEC cell proliferation caused by VEGF. DVD044, DVD048, DVD040 DVD050 inhibited HUVEC cell proliferation by >90% at 67 nM concentration of DVD-Igs.

TABLE 23
Inhibition Of HUVEC Proliferation/Survival by 7 DLL4/VEGF DVD-Ig
Constructs and Parent Antibodies

| | | | | | | DVD-Ig | | Ref. Ab. |
|---|---|---|---|---|---|---|---|---|
| | | | | | | inhibition of | | inhibition of |
| | | | | | Other | HUVEC | | HUVEC |
| DVD-Ig | Sequence | | HC | LC | DVD-Ig | proliferation | Ref. Ab. | proliferation |
| ID | ID | Orientation | linker | linker | VD | (IC50, nM) | ID | (IC50, nM) |
| DVD470 | DLL4 | C-term. | Long | Long | VEGF | 0.45 | AB014 | 0.19 |
| | (Seq. 1) | | | | (Seq. 1) | | | |
| DVD476 | DLL4 | C-term. | Long | Short | VEGF | 0.24 | AB014 | 0.19 |
| | (Seq. 1) | | | | (Seq. 1) | | | |
| DVD482 | DLL4 | C-term. | Short | Long | VEGF | 0.32 | AB014 | 0.19 |
| | (Seq. 1) | | | | (Seq. 1) | | | |
| DVD474 | DLL4 | C-term. | Long | Long | VEGF | 0.42 | AB071 | 2.5 |
| | (Seq. 1) | | | | (Seq. 2) | | | |
| DVD486 | DLL4 | C-term. | Short | Long | VEGF | 0.88 | AB071 | 2.5 |
| | (Seq. 1) | | | | (Seq. 2) | | | |
| DVD485 | DLL4 | N-term. | Short | Long | VEGF | 59.5 | AB071 | 2.5 |
| | (Seq. 1) | | | | (Seq. 2) | | | |
| DVD471 | DLL4 | N-term. | Long | Long | VEGF | 6.8 | AB070 | 7.0 |
| | (Seq. 1) | | | | (Seq. 3) | | | |

[0654] All DVD-Igs containing VDs from AB014, AB071, and AB071 inhibited HUVEC cell proliferation caused by VEGF. DVD470, DVD476, DVD482 DVD474, 486, 485, and 471 inhibited HUVEC cell proliferation with IC₅₀ comparable to parental mAbs.

### Example 1.1.2.F

### Tumor Cell Growth Inhibitory Effect of IGF1,2 Monoclonal Antibodies or DVD-Igs In Vitro

[0655] IGF1,2 monoclonal antibodies or DVD-Igs diluted in D-PBS-BSA (Dulbecco's phosphate buffered saline with 0.1% BSA) 20 μL were added to human tumor cells at final concentrations of 0.01 μg/mL-100 μg/mL in 200 μL. The plates were incubated at 37° C. in a humidified, 5% CO₂ atmosphere for three days. The number of live cells in each well was quantified using MTS reagents according to the manufacturer's instructions (Promega, Madison, Wis.) to determine the percent of tumor growth inhibition. Wells without antibody treatment were used as controls of 0% inhibition whereas wells without cells were considered to show 100% inhibition.

TABLE 24
H929, IGFR Line Proliferation Inhibition Assay With IGF1R
and IGF1,2 Parent Antibodies and DVD-Ig Constructs

| | | | N-terminal VD | C-terminal VD |
|---|---|---|---|---|
| | N-terminal | C-terminal | Proliferation | Proliferation |
| | Variable | Variable | Inhibition Cellular | Inhibition Cellular |
| Parent Antibody | Domain | Domain | Assay IC50 nM | Assay IC50 nM |
| or DVD-Ig ID | (VD) | (VD) | (H929, IGF1R line) | (H929, IGF1R line) |
| AB033 | EGFR | | >67 (5% max) | |
| AB004 | HER-2 | | >67 (10% max) | |
| DVD015 | EGFR | HER-2 | >50 (20% max) | |
| DVD016 | HER-2 | EGFR | | >50 (15% max) |
| AB033 | EGFR | | >67 (5% max) | |
| AB011 | IGF1R | | 0.1 (65% max) | |
| DVD021 | EGFR | IGF1R | | >50 (10% max) |
| DVD022 | IGF1R | EGFR | 0.05 (70% max) | |
| AB004 | HER-2 | | >67 (10% max) | |
| AB010 | IGF1,2 | | 1.6 (70% max) | |
| DVD029 | HER-2 | IGF1,2 | | 6.8 (40% max) |
| DVD030 | IGF1,2 | HER-2 | 0.8 (70% max) | |
| AB004 | HER-2 | | >67 (10%) | |
| AB011 | IGF1R | | 0.1 (65% max) | |
| DVD031 | HER-2 | IGF1R | | >50 (10% max) |
| DVD032 | IGF1R | HER-2 | 0.1 (60% max) | |

[0656] All DVD-Igs containing VDs from AB033, AB004, AB011, or AB010 in either the N-terminal or C-terminal position showed inhibition in the A431 cell proliferation assay.

### Example 1.1.2.G

### Growth Inhibitory Effect of an EGFR Monoclonal Antibody or DVD-Igs In Vitro

[0657] EGFR monoclonal antibodies or DVD-Igs diluted in D-PBS-BSA (Dulbecco's phosphate buffered saline with 0.1% BSA) 20 μL were added to human tumor cells at final concentrations of 0.01 μg/mL-100 μg/mL in 180 uL. The plates were incubated at 37° C. in a humidified, 5% CO₂ atmosphere for 3 days. The number of live cells in each well was quantified using MTS reagents according to the manufacturer's instructions (Promega, Madison, Wis.) to determine the percent of tumor growth inhibition. Wells without antibody treatment were used as controls of 0% inhibition whereas wells without cells were considered to show 100% inhibition.

TABLE 25
A431, EGFR Cell Line Proliferation Inhibition Assay With
EGFR Parent Antibodies And DVD-Ig Constructs

| | N-terminal | C-terminal | N-terminal VD | C-terminal VD |
|---|---|---|---|---|
| Parent | Variable | Variable | Proliferation Inhibition | Proliferation Inhibition |
| Antibody or | Domain | Domain | Cellular Assay IC50 nM | Cellular Assay IC50 nM |
| DVD-Ig ID | (VD) | (VD) | (A431, EGFR line) | (A431 EGFR line) |
| AB033 | EGFR | | 1.0 | (65% max) |
| AB004 | HER-2 | | >67 | (10% max) |
| DVD015 | EGFR | HER-2 | 1.7 (65% max) | |
| DVD016 | HER-2 | EGFR | | 5.4 (80% max) |
| AB033 | EGFR | | 1.0 | (65% max) |
| AB011 | IGF1R | | >67 | (5% max) |
| DVD021 | EGFR | IGF1R | 1.5 (50% max) | |
| DVD022 | IGF1R | EGFR | | 3.4 (65% max) |
| AB004 | HER-2 | | >67 | (10% max) |
| AB010 | IGF1,2 | | >67 | (10% max) |
| DVD029 | HER-2 | IGF1,2 | >50 | (10% max) |
| DVD030 | IGF1,2 | HER-2 | >50 | (10% max) |
| AB004 | HER-2 | | >67 | (10% max) |
| AB011 | IGF1R | | >67 | (5% max) |
| DVD031 | HER-2 | IGF1R | >50 | (10% max) |
| DVD032 | IGF1R | HER-2 | >50 | (10% max) |
| AB014 | VEGF | | >67 | (0%) |
| AB010 | IGF1,2 | | >67 | (10% max) |
| DVD041 | VEGF | IGF1,2 | >50 | (0%) |

[0658] All DVD-Igs containing VDs from AB033, AB004, AB011, AB010, AB014 in either N-terminal or C-terminal position showed inhibition of A431 cell proliferation assay.

TABLE 26
GEO, EGFR/IGF1R Cell Line Proliferation Inhibition Assay With EGFR,
IGF1R And IGF1,2 Parent Antibodies And DVD-Ig Constructs

| | | | N-terminal | |
|---|---|---|---|---|
| | N- | C- | Proliferation | C-terminal |
| Parent | terminal | terminal | Inhibition Cellular | Proliferation |
| Antibody | Variable | Variable | Assay IC50 nM | Inhibition Cellular |
| or DVD-Ig | Domain | Domain | (GEO, EGFR/IGF1R | Assay IC50 nM (GEO, |
| ID | (VD) | (VD) | line) | EGFR/IGF1R line) |
| AB033 | EGFR | | 0.2 (60% max) | |
| AB004 | HER-2 | | >67 (15% max) | |
| DVD015 | EGFR | HER-2 | 13 (60% max) | |
| DVD016 | HER-2 | EGFR | | 10 (40% max) |
| AB033 | EGFR | | 0.2 (60% max) | |
| AB011 | IGF1R | | >67 (15% max) | |
| DVD021 | EGFR | IGF1R | 0.32 (60% max) | 0.32 (60% max) |
| DVD022 | IGF1R | EGFR | 3.0 (40% max) | 3.0 (40% max) |
| AB004 | HER-2 | | >67 (15% max) | |
| AB010 | IGF1,2 | | 20% at 67 nM | |
| DVD029 | HER-2 | IGF1,2 | >50 (10% max) | >50 (10% max) |
| DVD030 | IGF1,2 | HER-2 | >50 (10% max) | >50 (10% max) |
| AB004 | HER-2 | | >67 (15% max) | |
| AB011 | IGF1R | | >67 (15% max) | |
| DVD031 | HER-2 | IGF1R | >50 (10% max) | >50 (10% max) |
| DVD032 | IGF1R | HER-2 | >50 (10% max) | >50 (10% max) |

[0659] All DVD-Igs containing VDs from AB033, AB004, AB011, AB010, AB014 in either N-terminal or C-terminal position showed inhibition of GEO cell proliferation assay.

### Example 1.1.2.H

### Tumor Cell Growth Inhibitory Effect of HER2 Parent Antibody or DVD-Ig Constructs In Vitro

[0660] HER2 monoclonal antibody or DVD-Igs diluted in D-PBS-BSA (Dulbecco's phosphate buffered saline with 0.1% BSA) 204, were added to HER2-expressing human tumor cells (BT474) at final concentrations of 0.01 μg/mL-100 μg/mL (180 μL). The plates were incubated at 37° C. in a humidified, 5% CO₂ atmosphere for three days. The number of live cells in each well was quantified using MTS reagents according to the manufacturer's instructions (Promega, Madison, Wis.) to determine the percent of tumor growth inhibition. Wells without antibody treatment were used as controls of 0% inhibition whereas wells without cells were considered to show 100% inhibition.

TABLE 27
BT474, Erb2(Her-2) Cell Line Proliferation Inhibition Assay With
Anti-Her-2 Parent Antibodies And DVD-Ig Constructs

| | | | N-terminal VD | C-terminal VD |
|---|---|---|---|---|
| | | | Proliferation | Proliferation |
| | | | Inhibition | Inhibition |
| | N-terminal | C-terminal | Cellular Assay | Cellular |
| Parent | Variable | Variable | IC50 nM | Assay IC50 nM |
| Antibody or | Domain | Domain | (BT474, ErbB2 | (BT474, ErbB2 |
| DVD-Ig ID | (VD) | (VD) | line) | line) |
| AB004 | HER-2 | | 0.9 | |
| DVD015 | EGFR | HER-2 | | >50 |
| DVD016 | HER-2 | EGFR | 1.7 | |
| AB004 | HER-2 | | 0.9 | |
| DVD029 | HER-2 | IGF1,2 | 2.7 | |
| DVD030 | IGF1,2 | HER-2 | | >50 |
| AB004 | HER-2 | | 0.9 | |
| DVD031 | HER-2 | IGF1R | 2.2 | |
| DVD032 | IGF1R | HER-2 | | >50 |

[0661] All DVD-Igs containing VD from AB004 in either N-terminal or C-terminal position showed inhibition in the BT474 cell proliferation assay.

### Example 1.1.2.I

### Inhibition of Recombinant DLL4-Dependent Increase of Svegfr1 (Sflt1) in Eahy.926 Cells by DLL4 Parent Antibody and DVD-12 Constructs

[0662] 96-well tissue culture plates were coated with 100 μl/well human DLL4 extracellular domain at 5 μg/ml in D-PBS (Gibco #14190, Grand Island, N.Y.) and incubated overnight at 4° C. Plates were washed once with D-PBS and 4000 EA.hy926 cells/well were seeded in the absence or presence of antibodies or DVD-Igs. Cell proliferation was measured four days later using the CyQUANT Cell Proliferation Assay Kit (Invitrogen, #C35007, Eugene, Oreg.). sVEGFR1 expression in the conditioned media was detected by an ELISA kit per the manufacturer's recommendations (R&D Systems #DVR100B, Minneapolis, Minn.). Levels of sVEGFR1 were normalized to the RFU determined by CyQUANT assay to account for differences in cell proliferation.

TABLE 28
Inhibition Of DLL4-Dependent Increase Of Svegfr1 (Sflt1) In
Eahy.926 Cells By DLL4 Parent Antibodies Or DVD-Ig Constructs

| | N- | C- | | |
|---|---|---|---|---|
| Parent | terminal | terminal | N-terminal VD | C-terminal VD |
| Antibody | Vari- | Vari- | Soluble Flt1 Assay | Soluble Flt1 Assay |
| or | able | able | (% of | (% of |
| DVD-Ig | Domain | Domain | Neutralization @ | Neutralization @ |
| ID | (VD) | (VD) | nM Ab) | nM Ab) |
| AB015 | DLL-4 | | 75.2% @9.2 nM, 78.7% @27.7 nM, | |
| | | | 86.6% @83.3 nM | |
| DVD044 | DLL4 | VEGF | 39.8% @9.2 nM, | |
| | | | 76.2% @27.7 nM, | |
| | | | 79.9% @83.3 nM | |
| DVD043 | VEGF | DLL4 | | 1.1% @9.2 nM, |
| | | | | 50.3% @27.7 nM, |
| | | | | 57.9% @83.3 nM |

[0663] DVD-Igs containing VD from AB015 in either N-terminal or C-terminal position showed dose-dependent inhibition of sFLT release induced by DLL4 from Eahy.926 cells.

TABLE 29

Inhibition Of DLL4 (2 μg/ml)-Dependent Increase Of sVEGFR1 (sFlt1) In
EA.hy926 Cells by 7 DLL4/VEGF DVD-Ig Constructs and the Parent Antibody

| | | | | | | DVD-Ig | | Ref. Ab |
|---|---|---|---|---|---|---|---|---|
| | | | | | | Inhibition | | Inhibition |
| | | | | | | of | | of |
| | | | | | Other | sFlt1 | | sFlt1 |
| DVD-Ig | | | HC | LC | DVD- | (IC50, | Ref. | (IC50, |
| ID | Seq. ID | Orientation | linker | linker | Ig VD | nM) | Ab. ID | nM) |
| DVD470 | DLL4 | C-term. | Long | Long | VEGF | 1.02 | AB015 | 0.34 |
| | (Seq. 1) | | | | (Seq. 1) | | | |
| DVD476 | DLL4 | C-term. | Long | Short | VEGF | 1.68 | AB015 | 0.34 |
| | (Seq. 1) | | | | (Seq. 1) | | | |
| DVD482 | DLL4 | C-term. | Short | Long | VEGF | 1.11 | AB015 | 0.34 |
| | (Seq. 1) | | | | (Seq. 1) | | | |
| DVD474 | DLL4 | C-term. | Long | Long | VEGF | 0.93 | AB015 | 0.34 |
| | (Seq. 1) | | | | (Seq. 2) | | | |
| DVD486 | DLL4 | C-term. | Short | Long | VEGF | 0.70 | AB015 | 0.34 |
| | (Seq. 1) | | | | (Seq. 2) | | | |
| DVD485 | DLL4 | N-term. | Short | Long | VEGF | 6.67 | AB015 | 0.34 |
| | (Seq. 1) | | | | (Seq. 2) | | | |
| DVD471 | DLL4 | N-term. | Long | Long | VEGF | 1.92 | AB015 | 0.34 |
| | (Seq. 1) | | | | (Seq. 3) | | | |

[0664] DVD-Igs containing VD from AB015 in either N-terminal or C-terminal position showed dose-dependent inhibition of sFLT1 release induced by DLL4 from Eahy.926 cells.

### Example 1.1.2.J

### Tumoricidal Effect of a Parent or DVD-Ig Antibody In Vitro

[0665] Parent antibodies or DVD-Ig that bind to target antigens on tumor cells may be analyzed for tumoricidal activity. Briefly, parent antibodies or DVD-Ig are diluted in D-PBS-BSA (Dulbecco's phosphate buffered saline with 0.1% BSA) and added to human tumor cells at final concentrations of 0.01 μg/mL to 100 μg/mL 200 μL. The plates are incubated at 37° C. in a humidified, 5% CO₂ atmosphere for 3 days. The number of live cells in each well is quantified using MTS reagents according to the manufacturer's instructions (Promega, Madison, Wis.) to determine the percent of tumor growth inhibition. Wells without antibody treatment are used as controls of 0% inhibition whereas wells without cells were considered to show 100% inhibition.

[0666] For assessment of apoptosis, caspase-3 activation was determined by the following protocol: antibody-treated cells in 96 well plates are lysed in 120 μl of 1× lysis buffer (1.67 mM Hepes, pH 7.4, 7 mM KCl, 0.83 mM MgCl₂, 0.11 mM EDTA, 0.11 mM EGTA, 0.57% CHAPS, 1 mM DTT, 1× protease inhibitor cocktail tablet; EDTA-free; Roche Pharmaceuticals, Nutley, N.J.) at room temperature with shaking for 20 minutes. After cell lysis, 80 μl of a caspase-3 reaction buffer (48 mM Hepes, pH 7.5, 252 mM sucrose, 0.1% CHAPS, 4 mM DTT, and 20 μM Ac-DEVD-AMC substrate; Biomol Research Labs, Inc., Plymouth Meeting, Pa.) is added and the plates are incubated for 2 hours at 37° C. The plates are read on a 1420 VICTOR Multilabel Counter (Perkin Elmer Life Sciences, Downers Grove, Ill.) using the following settings: excitation=360/40, emission=460/40. An increase of fluorescence units from antibody-treated cells relative to the isotype antibody control-treated cells is indicative of apoptosis.

### Example 1.1.2.K

### Inhibition of U87-MG Tumor Cell Proliferation by HGF Parent Antibody and DVD-Ig Constructs

[0667] U87-MG human glioma tumor cells were plated at 2,000 cells/well in 100 μl in 96-well dishes in RPMI medium supplemented with 5% fetal bovine serum, and incubated at 37° C., 5% CO₂ overnight. The following day the cells were treated with serial dilutions of antibody or DVD-Igs (0.013 nM to 133 nM dose range), and incubated at 37° C. in a humidified, 5% CO₂ atmosphere for 5 days. Cell survival/proliferation was measured indirectly by assessing ATP levels using an ATPlite kit (Perkin Elmer, Waltham, Mass.) according to the manufacturer's instructions.

TABLE 30
U87-MG Tumor Proliferation Inhibition by anti-HGF
Parent Antibody and DVD-Ig Constructs

| | | | N-terminal | C-terminal |
|---|---|---|---|---|
| | | | VD | VD |
| | | C-terminal | inhibition of | inhibition of |
| Parent | N-terminal | Variable | U87MG | U87MG |
| Antibody or | Variable | Domain | proliferation | proliferation |
| DVD-Ig ID | Domain (VD) | (VD) | (EC50) | (EC50) |
| AB012 | HGF | | 12 | |
| DVD025 | EGFR | HGF | | >200 |
| AB012 | HGF | | 12 | |
| DVD033 | RON | HGF | | >200 |
| DVD034 | HGF | RON | 136 | |

| | | |
|---|---|---|
| AB012 | HGF | 12 |

| | | | |
|---|---|---|---|
| DVD045 | VEGF | HGF | >200 |

| | | |
|---|---|---|
| AB008 | CD22 | >200 |

[0668] DVD-Igs containing a VD from AB012 in the C-terminal position or N-terminal position inhibited U87-MG tumor cell proliferation.

### Example 1.1.2.L

### Inhibition of RON Interaction with MSP1 by RON Parent Antibody and DVD-Ig Constructs In Vitro

[0669] 96-well plates were coated with 50 μl/well of an anti-MSPα chain antibody (R&D Systems #MAB352, Minneapolis, Minn., 2 μg/mL), and plates were incubated overnight at 4° C. Plates were washed three times in wash buffer (PBS containing 0.05% Tween 20), and subsequently blocked with 100 μl/well of blocking buffer (PBS containing 2% BSA) for one hour at 25° C. Plates were then washed three times, and incubated with 50 μl/well of a 10 nM solution of recombinant human MSP1 (R&D Systems #352-MS, Minneapolis, Minn.) for one hour at 25° C. During plate incubation, serial 10-fold dilutions of the antibodies to be tested (0 nM to 1000 nM dose range) were pre-incubated with 10 nM recombinant His-RON partial ECD (R&D Systems #1947-MS, Minneapolis, Minn.) at 25° C. for one hour. Plates incubated with recombinant human MSP1 were washed three times, and 50 μl/well of the antibody/His-RON complexes were then added in triplicate. Following a one hour incubation at 25° C., the plates were then washed, and 50 μl/well of a TMB substrate (Pierce #34028, Rockford, Ill.) were added and incubated for five minutes at 25° C. The reaction was terminated after five minutes using 50 μl/well of 2N H₂SO₄. The absorbance was read at 450 nm (Spectra Max Plus plate reader, Molecular Devices, Sunnyvale, Calif.). EC50s were calculated in GraphPad Prism 4.03.

### Example 1.1.2.M

### VEGF Parent Antibody and DVD-Ig Constructs Prevent VEGF₁₆₅ Interaction with VEGFR1

[0670] ELISA plates (Nunc, MaxiSorp, Rochester, N.Y.) were incubated overnight at 4° C. with 100 μl PBS containing recombinant VEGFR1 extra-cellular domain-Fc fusion protein (5 μg/ml, R&D systems, Minneapolis, Minn.). Plates were washed three times in washing buffer (PBS containing 0.05% Tween 20), and blocked for 1 hour at 25° C. in blocking buffer (PBS containing 1% BSA). Serial dilutions of each antibody/DVD-Ig in PBS containing 0.1% BSA were incubated with 50 μl of 2 nM biotinylated VEGF for 1 hour at 25° C. The antibody/DVD-Ig-biotinylated VEGF mixtures (100 μl) were then added to the VEGFR1-Fc coated wells and incubated at 25° C. for 10 minutes. The wells were washed three times, and then incubated for 1 hour at 25° C. with 100 μl of streptavidin-HRP (KPL #474-3000, Gaithersburg, Md.). The wells were washed three times, and 100 μl of ULTRA-TMB ELISA (Pierce, Rockford, Ill.) were added per well. Following color development the reaction was stopped with 1N HCL and absorbance at 450 nM was measured. The results are provided in Table 17 below.

TABLE 31

Inhibition of Ligand-Receptor Interaction between VEGF and VEGFR1 for 7
DLL4/VEGF DVD-Ig Constructs and Parent Antibodies

| | | | | | | | | |
|---|---|---|---|---|---|---|---|---|
| | | | | | | DVD-Ig | | Ref. Ab. |
| | | | | | | VEGF | | VEGF |
| | | | | | | Ligand- | | Ligand- |
| | | | | | | Receptor | | Receptor |
| | | | | | | Binding | | Binding |
| | | | | | Other | Inhibition | | Inhibition |
| DVD-Ig | Seq. | | HC | LC | DVD-Ig | (IC50, | Ref. | (IC50, |
| ID | ID | Orientation | linker | linker | VD | nM) | Ab. ID | nM) |

| | | | | | | | | |
|---|---|---|---|---|---|---|---|---|
| DVD470 | DLL4 | C- | Long | Long | VEGF | 2.7 | AB014 | 2.2 |
| | (Seq. 1) | term. | | | (Seq. 1) | | | |
| DVD476 | DLL4 | C- | Long | Short | VEGF | 2.4 | AB014 | 2.2 |
| | (Seq. 1) | term. | | | (Seq. 1) | | | |
| DVD482 | DLL4 | C- | Short | Long | VEGF | 1.7 | AB014 | 2.2 |
| | (Seq. 1) | term. | | | (Seq. 1) | | | |
| DVD474 | DLL4 | C- | Long | Long | VEGF | 1.89 | AB071 | 7.3 |
| | (Seq. 1) | term. | | | (Seq. 2) | | | |
| DVD486 | DLL4 | C- | Short | Long | VEGF | 1.98 | AB071 | 7.3 |
| | (Seq. 1) | term. | | | (Seq. 2) | | | |
| DVD485 | DLL4 | N- | Short | Long | VEGF | 8.63 | AB071 | 7.3 |
| | (Seq. 1) | term. | | | (Seq. 2) | | | |
| DVD471 | DLL4 | N- | Long | Long | VEGF | 5.46 | AB070 | 2.8 |
| | (Seq. 1) | term. | | | (Seq. 3) | | | |

[0671] All DVD-Igs containing VD from AB014 and AB071 and AB071 in either N-terminal or C-terminal positions showed inhibition of ligand (VEGF) to its receptor (VEGFR1). The N-terminal domain of DVD-Ig blocked ligand-receptor interaction as well as parent antibody.

### Example 1.1.2.N

### Inhibition of DLL4 Interaction with Notch-1 by DLL4 Parent Antibody and DVD-Ig Constructs In Vitro

[0672] 96-well Nunc-Immuno plates (Nunc, #439-454, Rochester, N.Y.) were coated with 16 nM human Notch-1 (R&D Systems #3647-TK, Minneapolis, Minn., 100 μl/well in D-PBS) and incubated overnight at 4° C. Plates were then washed once with wash buffer (PBS, 0.05% Tween 20) and blocked with 200 μl/well blocking buffer (D-PBS, 1% BSA, 1 mM CaCl₂, 0.05% Tween 20) for 1 hour at 25° C. While blocking, 300 μl biotin labeled human DLL4 extracellular domain (14 nM) was mixed with antibody or DVD-Ig (3.4 pM-66 nM, 3-fold serial dilution in blocking buffer) for 1 hour at 25° C. Assay plates were washed after blocking, and incubated with DLL4 antibody or DVD-Ig mixtures (100 μl/well, 1 hour at 25° C.). Plates were washed again and 100 μl/well streptavidin conjugated with HRP (KPL #474-3000, Gaithersburg, Md., diluted 1:10,000 in blocking buffer) was added for 1 hour at 25° C. After a final wash, plates were developed using 100 μl/well substrate (1-Step Ultra TMB-ELISA, Pierce #340280, Rockford, Ill.), and the reaction was stopped after a 10-20 minute incubation at 25° C. using 100 μl/well 2N H₂SO₄, and the absorbance was read at 450 nm. The results are provided in Table 32 below.

TABLE 32

Inhibition of Ligand-Receptor Interaction between DLL4 and Notch1 for 7
DLL4/VEGF DVD-Ig Constructs and the Parent Antibody

| | | | | | | DVD-Ig | | Ref. Ab. |
|---|---|---|---|---|---|---|---|---|
| | | | | | | DLL4 | | DLL4 |
| | | | | | | Ligand- | | Ligand- |
| | | | | | | Receptor | | Receptor |
| | | | | | Other | Binding | | Binding |
| DVD-Ig | | | HC | LC | DVD-Ig | Inhibition | Ref. Ab. | Inhibition |
| ID | Seq. ID | Orientation | linker | linker | VD | (IC50, nM) | ID | (IC50, nM) |
| DVD470 | DLL4 | C-term. | Long | Long | VEGF | 2.82 | AB015 | 2.47 |
| | (Seq. 1) | | | | (Seq. 1) | | | |
| DVD476 | DLL4 | C-term. | Long | Short | VEGF | 4.90 | AB015 | 2.69 |
| | (Seq. 1) | | | | (Seq. 1) | | | |
| DVD482 | DLL4 | C-term. | Short | Long | VEGF | 2.65 | AB015 | 2.53 |
| | (Seq. 1) | | | | (Seq. 1) | | | |
| DVD474 | DLL4 | C-term. | Long | Long | VEGF | 2.30 | AB015 | 2.69 |
| | (Seq. 1) | | | | (Seq. 2) | | | |
| DVD486 | DLL4 | C-term. | Short | Long | VEGF | 2.91 | AB015 | 2.74 |
| | (Seq. 1) | | | | (Seq. 2) | | | |
| DVD485 | DLL4 | N-term. | Short | Long | VEGF | 3.44 | AB015 | 2.74 |
| | (Seq. 1) | | | | (Seq. 2) | | | |
| DVD471 | DLL4 | N-term. | Long | Long | VEGF | 2.66 | AB015 | 2.47 |
| | (Seq. 1) | | | | (Seq. 3) | | | |

[0673] All DVD-Igs containing VD from AB015 in either N-terminal or C-terminal positions showed inhibition of ligand (DLL4) to its receptor (Notch1). The N-terminal domain of DVD-Ig blocked ligand-receptor interaction as well as parent antibody.

TABLE 33

Inhibition of Ligand-Receptor Interaction between 293G-human
DLL4 cells and Notch1 by FACS for 7 DLL4/VEGF DVD-Ig
Constructs and the Parent Antibody

| | | | | | | | | |
|---|---|---|---|---|---|---|---|---|
| | | | | | | DVD-Ig | | Ref. Ab. |
| | | | | | | Inhibition | | Inhibition |
| | | | | | | of Notch1 | | of Notch1 |
| | | | | | | Binding to | | Binding to |
| | | | | | | DLL4 | | DLL4 |
| | | | | | Other | Cell FACS | | Cell FACS |
| DVD-Ig | | | HC | LC | DVD-Ig | (IC50, | Ref. | (IC50, |
| ID | Seq. ID | Orientation | linker | linker | VD | nM) | Ab. ID | nM) |

| | | | | | | | | |
|---|---|---|---|---|---|---|---|---|
| DVD470 | DLL4 | C-term. | Long | Long | VEGF | 38.3 | AB015 | 2.3 |
| | (Seq. 1) | | | | (Seq. 1) | | | |
| DVD476 | DLL4 | C-term. | Long | Short | VEGF | 15.1 | AB015 | 2.3 |
| | (Seq. 1) | | | | (Seq. 1) | | | |
| DVD482 | DLL4 | C-term. | Short | Long | VEGF | 16.3 | AB015 | 2.3 |
| | (Seq. 1) | | | | (Seq. 1) | | | |
| DVD474 | DLL4 | C-term. | Long | Long | VEGF | 27.5 | AB015 | 2.3 |
| | (Seq. 1) | | | | (Seq. 2) | | | |
| DVD486 | DLL4 | C-term. | Short | Long | VEGF | 10.2 | AB015 | 2.3 |
| | (Seq. 1) | | | | (Seq. 2) | | | |
| DVD485 | DLL4 | N-term. | Short | Long | VEGF | 6.3 | AB015 | 2.3 |
| | (Seq. 1) | | | | (Seq. 2) | | | |
| DVD471 | DLL4 | N-term. | Long | Long | VEGF | 4.1 | AB015 | 2.3 |
| | (Seq. 1) | | | | (Seq. 3) | | | |

### Example 1.1.2.O

### Inhibition of HGF Interaction with c-Met by HGF Parent Antibody and DVD-Ig Constructs

[0674] ELISA plates (Nunc, MaxiSorp) were coated with 100 μl/well of recombinant human HGF (2 μg/ml of HGF in PBS, R&D systems) overnight at 4° C. Serial dilutions of each antibody/DVD-Ig and 2 nM soluble c-Met Fc fusion (R&D systems) (50 μl), were co-incubated and added to HGF coated wells. c-Met binding was detected with biotinylated anti-c-Met (BAF358, R&D Systems) and 100 μl of streptavidin-HRP (KPL). The wells were washed three times in PBST (PBS containing 0.05% Tween 20), and 100 μl of ULTRA-TMB ELISA (Pierce) were added per well. Following color development the reaction was stopped with 1N HCL and absorbance at 450 nM was measured. The data were evaluated by calculating the percentage inhibition compared with the maximal signal (control antibody or no antibody added) and the IC₅₀ values were calculated.

[0675] The following table contains the affinity data, expressed as IC50 in nM, of parent antibodies and DVD-Ig constructs in the ligand-receptor binding competition ELISA assays for RON, VEGF, DLL4, and HGF as described above.

TABLE 34
Inhibition Of Ligand-Receptor Interaction With RON, VEGF DLL4,
And HGF Parent Antibodies And DVD-Ig Constructs In Vitro

| | | | N-terminal | C-terminal |
|---|---|---|---|---|
| | | | VD | VD |
| | | | Ligand- | Ligand- |
| | | | Receptor | Receptor |
| | N-terminal | C-terminal | Binding | Binding |
| | Variable | Variable | Competition | Competition |
| Parent Antibody | Domain | Domain | Assay (IC50, | Assay (IC50, |
| or DVD-Ig ID | (VD) | (VD) | nM) | nM) |
| AB005 | RON | | 8.1 | |
| DVD024 | RON | EGFR | 9.6 | |
| DVD023 | EGFR | RON | | |
| AB005 | RON | | 0.32 | |
| DVD033 | RON | HGF | **0.0000097 | |
| DVD034 | HGF | RON | | |
| AB014 | VEGF | | 21.40 | |
| DVD035 | VEGF | EGFR | 23.90 | |
| AB014 | VEGF | | 21.40 | |
| DVD038 | HER-2 | VEGF | | 73.00 |
| AB015 | DLL-4 | | 0.37 | |
| AB014 | VEGF | | 21.4 | |
| DVD044 | DLL4 | VEGF | 0.50 | 143 |
| DVD043 | VEGF | DLL4 | 24.1 | 13.10 |
| AB005 | RON | | 0.1 | |
| AB014 | VEGF | | 21.4 | |
| DVD048 | RON | VEGF | 0.1127 | 114 |
| DVD047 | VEGF | RON | 30.5 | 21.28 |
| AB014 | VEGF | | 21.40 | |
| DVD050 | NRP1 | VEGF | | 79.00 |
| AB015 | DLL-4 | | 0.4 | |
| DVD257 | DLL4 | P1GF | 0.38 | |
| DVD258 | P1GF | DLL4 | | 17.47 |
| AB014 | VEGF | | 21.40 | |
| DVD260 | P1GF | VEGF | | 13.00 |
| AB012 | HGF | | 0.18 | |
| DVD025 | EGFR | HGF | | >100 |
| AB012 | HGF | | 0.18 | |
| DVD045 | VEGF | HGF | | >100 |
| AB012 | HGF | | 0.18 | |
| DVD033 | RON | HGF | | 8.7 |
| DVD034 | HGF | RON | 0.34 | |

[0676] All DVD-Igs containing VD from AB005, AB015, AB015, AB012, in either N-terminal or C-terminal positions showed inhibition of ligand to their respective receptors. The N-terminal domain of DVD-Ig blocked ligand-receptor interaction as well as parent antibody.

TABLE 35
Inhibition Of Ligand-Receptor Interaction Parent
Antibodies And DVD-Ig Constructs In Vitro

| | | | N-terminal VD | C-terminal VD |
|---|---|---|---|---|
| | | | Ligand- | Ligand- |
| | | | Receptor | Receptor |
| | N-terminal | C-terminal | Binding | Binding |
| Parent | Variable | Variable | Competition | Competition |
| Antibody or | Domain | Domain | Assay (IC50, | Assay (IC50, |
| DVD-Ig ID | (VD) | (VD) | nM) | nM) |
| AB047 | P1GF | | 3.07 | |
| DVD573 | P1GF | VEGF | 2.59 | |
| DVD574 | VEGF | P1GF | | 23.68 |
| AB047 | P1GF | | 3.07 | |
| DVD575 | P1GF | VEGF | 2.9 | |
| DVD576 | VEGF | P1GF | | 19.28 |
| AB047 | P1GF | | 3.07 | |
| DVD577 | P1GF | HER2 | 2.74 | |
| DVD578 | HER2 | P1GF | | 21.36 |
| AB047 | P1GF | | 3.07 | |
| DVD579 | P1GF | VEGF | 5.84 | |
| AB047 | P1GF | | 3.07 | |
| DVD581 | P1GF | VEGF | 3.5 | |
| DVD582 | VEGF | P1GF | | 5.71 |
| AB047 | P1GF | | 3.07 | |
| DVD583 | P1GF | VEGF | 3.25 | |
| DVD584 | VEGF | P1GF | | 3.71 |
| AB047 | P1GF | | 3.07 | |
| DVD585 | P1GF | HER2 | 3.4 | |
| DVD586 | HER2 | P1GF | | 3.87 |
| AB047 | P1GF | | 3.07 | |
| DVD587 | P1GF | VEGF | 3.65 | |
| AB047 | P1GF | | 3.07 | |
| DVD589 | P1GF | VEGF | 2.87 | |
| AB047 | P1GF | | 3.07 | |
| DVD591 | P1GF | VEGF | 3.23 | |
| DVD592 | VEGF | P1GF | | 3.93 |
| AB047 | P1GF | | 3.07 | |
| DVD593 | P1GF | HER2 | 2.76 | |
| DVD594 | HER2 | P1GF | | 4.01 |
| AB047 | P1GF | | 3.07 | |
| DVD595 | P1GF | VEGF | 3.65 | |
| AB047 | P1GF | | 3.07 | |
| DVD597 | P1GF | VEGF | 2.94 | |
| DVD598 | VEGF | P1GF | | 4.64 |
| AB047 | P1GF | | 3.07 | |
| DVD599 | P1GF | VEGF | 3.19 | |
| DVD600 | VEGF | P1GF | | 4.02 |
| AB047 | P1GF | | 3.07 | |
| DVD601 | P1GF | HER2 | 2.98 | |
| DVD602 | HER2 | P1GF | | 3.75 |

[0677] All DVD-Igs containing VD from AB047 in either N-terminal or C-terminal positions showed inhibition of ligand to its receptor (VEGFR1). The N-terminal domain of DVD-Ig blocked ligand-receptor interaction as well as parent antibody.

### Example 1.1.2.P

### Inhibition of IGF-Induced IGFR Phosphorylation by Parent Antibodies or DVD-Ig Constructs In Vitro

[0678] Human carcinoma cells were plated in 96-well plates at 40,000 cells/well in 180 μl serum-free medium (DMEM+0.1% BSA), and incubated overnight at 37° C., 5% CO₂. Costar EIA plates (Lowell, Mass.) were coated with 100 μl/well of IGFR capture Ab (R&D Systems cat #MAB391, Minneapolis, Minn., 4 μg/ml final concentration), and incubated overnight at room temperature while shaking. The following day, IGFR antibody-coated ELISA plates were washed (three times with PBST=0.05% Tween 20 in PBS, pH 7.2-7.4), and 200 μl blocking solution was added (1% BSA, 0.05% NaN3 in PBS, pH 7.2-7.4) to block for 2 hours at room temperature on a rocker. Human tumor cells were co-incubated with antibodies or DVD-Igs and IGF ligand. IGF1,2 monoclonal antibodies or DVD-Igs diluted in D-PBS-BSA (Dulbecco's phosphate buffered saline with 0.1% BSA) were added to human carcinoma cells at final concentrations of 0.01 μg/mL-100 μg/mL. Growth factors (IGF1 and IGF2) were simultaneously added to the cells at concentrations of 1-100 ng/mL (200 μL), and cells were incubated at 37° C. in a humidified, 5% CO₂ atmosphere for 1 hour. Cells were lysed in 120 μl/well of cold cell extraction buffer (10 mM Tris, pH 7.4, 100 mM NaCl, 1 mM EDTA, 1 mM EGTA, 1 mM NaF, 1 mM sodium orthovanadate, 1% Triton X-100, 10% Glycerol, 0.1% SDS, and protease inhibitor cocktail), and incubated at 4° C. for 20 minutes with shaking. Cell lysates (1000 were added to the ELISA plate, and incubated overnight at 4° C. with gentle shaking. The following day, ELISA plates were washed, and 100 μl/well of pTyr-HRP detection Ab was added (p-IGF1R ELISA kit, R&D System # DYC1770, Minneapolis, Minn.), and plates were incubated for 2 hours at 25° C. in the dark. Plates were developed to determine phospho-IGF1R per the manufacturer's instructions. Results are shown in Tables 36 and 37.

TABLE 36
Inhibition Of IGF1R Phosphorylation By IGF1 With Anti-IGF1,2
Parent Antibodies Or DVD-Ig Constructs

| Parent | | | N-terminal VD | C-terminal VD |
|---|---|---|---|---|
| Antibody | N-terminal | C-terminal | pIGF1R Cellular | pIGF1R Cellular |
| or | Variable | Variable | Assay (hIGF1 | Assay (hIGF1 |
| DVD-Ig | Domain | Domain | Neutralization | Neutralization |
| ID | (VD) | (VD) | IC50 nM) | IC50 nM) |
| AB010 | IGF1,2 | | 1.7 | |
| DVD029 | HER-2 | IGF1,2 | | 14.22 (40% max) |
| DVD030 | IGF1,2 | HER-2 | 1.9 | |
| AB010 | IGF1,2 | | 1.7 | |
| DVD041 | VEGF | IGF1,2 | | 16.8 (40% max) |
| DVD042 | IGF1,2 | VEGF | 1.8 | |

[0679] DVD-Igs containing the VD from AB010 in either the N-terminal or the C-terminal position showed inhibition of IGF1-induced IGF1R receptor phosphorylation. The VD of AB010 in N-terminal position of DVD-Ig blocked receptor phosphorylation as well as parent antibody AB010.

TABLE 37
Inhibition Of IGF1R Phosphorylation By IGF2 With Anti-IGF1,2
Parent Antibodies Or DVD-Ig Constructs

| Parent | | | N-terminal VD | C-terminal VD |
|---|---|---|---|---|
| Antibody | N-terminal | C-terminal | pIGFR1 Cellular | pIGFR1 Cellular |
| or | Variable | Variable | Assay (IGF2 | Assay (IGF2 |
| DVD-Ig | Domain | Domain | induced | induced |
| ID | (VD) | (VD) | IC50 nM) | IC50 nM |
| AB010 | IGF1,2 | | 0.3 | |
| DVD029 | HER-2 | IGF1,2 | ND | 1.9 |
| DVD030 | IGF1,2 | HER-2 | 0.4 | ND |
| AB010 | IGF1,2 | | 0.3 | |
| DVD041 | VEGF | IGF1,2 | ND | 1.5 |
| DVD042 | IGF1,2 | VEGF | 0.3 | ND |

[0680] DVD-Igs containing the VD from AB010 in either the N-terminal or the C-terminal position showed inhibition of IGF2-induced IGF1R receptor phosphorylation. The VD of AB010 in the N-terminal position of DVD-Ig blocked receptor phosphorylation as well as parent antibody AB010.

### Example 1.1.2.Q

### Inhibition of HGF-Mediated Phosphorylation of Akt by HGF Parent Antibody and DVD-12 Constructs

[0681] H1299 non-small cell lung tumor cells were plated at 20,000 cells/well (100 μl total volume) in 96-well plates and serum starved for 18 hours at 37° C., 5% CO₂. Anti-HGF monoclonal antibodies or DVD-Igs (final concentrations of 67 nM, 6.7 nM, and 0.67 nM) were diluted in Dulbecco's Minimal Essential Media containing 0.1% BSA and were pre-incubated with recombinant human HGF (50 ng/ml) in 50 μl for 1 hour at 25° C. These antibody/DVD-Ig and HGF mixtures (500 were then added to the cells, and the plates were incubated at 37° C. in a humidified, 5% CO₂ atmosphere for approximately 15 minutes. The cells were then fixed by adding an equal volume of 7.6% formaldehyde to each well and the plates were incubated for 15 minutes at 25° C. Following fixation, the cells were washed five times in PBS containing 0.1% Triton X-100. The cells were then treated with 150 μl of LI-COR Odyssey Blocking Buffer (Li-Cor Biosciences, Lincoln, Nebr.) per well, and incubated for 90 minutes at room temperature with moderate shaking. The blocking buffer was removed and the cells were incubated at 4° C. overnight with primary antibody diluted in blocking buffer (1:300 dilution Phospho Ser473-Akt, Cell Signaling Technology #4060, Boston, Mass.). The wells were then washed five times with PBS containing 0.1% Tween 20, and then incubated with secondary antibody (1:400 dilution of an anti-rabbit IRDye™ 680CW LI-COR (Li-Cor Biosciences, Lincoln, Nebr.) in 1×PBS with 0.2% Tween 20) for 1 hour at 25° C. The cells were washed five times with PBS containing 0.1% Tween 20, and imaged using an Odyssey Infrared Imaging System.

TABLE 38
Inhibition Of HGF-Mediated Phosphorylation Of Akt By
HGF Parent Antibody And DVD-Ig Constructs

| | | | N-Terminal VD | C-Terminal VD |
|---|---|---|---|---|
| Parent | | | Inhibition Of Akt | Inhibition Of Akt |
| Antibody | N-terminal | C-terminal | Phosphorylation | Phosphorylation |
| or | Variable | Variable | (% Inhibition At | (% Inhibition At |
| DVD-Ig | Domain | Domain | 67, 6.7 And 0.67 | 67, 6.7 And 0.67 |
| ID | (VD) | (VD) | nM Ab/DVD) | nm Ab/DVD) |
| AB012 | HGF | | 67 nM = 106%, 6.7 nM = 110%, | |
| | | | 0.67 nM = 79% | |
| DVD033 | RON | HGF | | 67 nM = 95%, |
| | | | | 6.7 nM = 91%, |
| | | | | 0.67 nM = 24% |
| DVD034 | HGF | RON | 67 nM = 111%, | |
| | | | 6.7 nM = 105%, | |
| | | | 0.67 nM = 99% | |

| | | |
|---|---|---|
| AB012 | HGF | 67 nM = 106%, 6.7 nM = 110%, |
| | | 0.67 nM = 79% |

| | | | |
|---|---|---|---|
| DVD045 | VEGF | HGF | 67 nM = 64%, |
| | | | 6.7 nM = −2%, |
| | | | 0.67 nM = −15% |

| | | |
|---|---|---|
| AB008 | CD22 | 67 nM = 8%, 6.7 nM = −13% |

[0682] DVD-Igs containing the VD from AB012 in either the N-terminal or the C-terminal position showed good inhibition of HGF-induced Akt phosphorylation. The VD of AB012 in the N-terminal position of DVD-Ig blocked Akt phosphorylation as well as parent antibody AB012.

### Example 1.1.2.R

### Inhibition of VEGFR2 (KDR) Phosphorylation by VEGF Parent Antibody and DVD-Ig Constructs

[0683] NIH3T3 cells expressing human VEGFR2 (KDR) were plated at 20,000 cells/well (100 μl) in 96-well plates in DMEM supplemented with 10% FBS. The following day, the cells were washed twice with DMEM and serum-starved for three hours in DMEM without FBS. Anti-VEGF parent antibody or DVD-Igs (at final concentrations of 67 nM, 6.7 nM and 0.67 nM) diluted in DMEM with 0.1% BSA were pre-incubated with recombinant human VEGF₁₆₅ (50 ng/ml) for 1 hour at 25° C. These antibody/DVD-Ig and VEGF mixtures were then added to the cells, and the plates were incubated at 37° C. in a humidified, 5% CO₂ atmosphere for 10 minutes. Cells were washed twice with ice cold PBS and lysed by addition of 100 μl/well of Cell Lysis Buffer (Cell Signaling, Boston, Mass.) supplemented with 0.1% NP40. Duplicate samples were pooled and 170 μl was added to wells of ELISA plates previously coated with anti-VEGFR2 antibody (R&D systems, AF357, Minneapolis, Minn.) and incubated at 25° C. with gentle shaking for two hours. The wells were washed five times with washing buffer (PBS containing 0.05% Tween 20), and incubated with 50 μl of 1:2000 dilution of biotinylated anti-phosphotyrosine antibody (4G10; Millipore, Billerica, Mass.) for 1 hour at 25° C. The wells were washed five times with PBS containing 0.05% Tween 20, and then incubated for 1 hour at 25° C. with streptavidin-HRP (KPL #474-3000, Gaithersburg, Md.). The wells were washed three times with streptavidin-HRP (KPL #474-3000, Gaithersburg, Md.)). The wells were washed three times with PBS containing 0.05% Tween 20, and 100 μl of ULTRA-TMB ELISA (Pierce, Rockford, Ill.) were added per well. Following color development the reaction was stopped with 1N HCL and absorbance at 450 nM was measured. The results are shown in Table 39.

TABLE 39
Inhibition Of VEGFR2 (KDR) Phosphorylation By
VEGF Parent Antibodies Or DVD-Ig Constructs

| | C-terminal | N-terminal | N-Terminal | C-Terminal |
|---|---|---|---|---|
| | Variable | Variable | VD | VD |
| Parent Antibody | Domain | Domain | Inhibition Of | Inhibition Of |
| or DVD-Ig ID | (VD) | (VD) | Pkdr (EC50) | Pkdr (EC50) |
| AB014 | VEGF | | 0.45 | |
| DVD044 | DLL4 | VEGF | | 10.40 |
| DVD043 | VEGF | DLL4 | 0.54 | |
| AB014 | VEGF | | 0.45 | |
| DVD048 | RON | VEGF | | 31.80 |
| DVD047 | VEGF | RON | 0.47 | |

[0684] DVD-Igs containing the VD from AB014 in either N-terminal or the C-terminal position showed good inhibition of VEGF-induced KDR phosphorylation. The VD of AB014 in the N-terminal position of DVD-Ig blocked KDR phosphorylation as well as parent antibody AB014.

### Example 1.1.2.S

### Inhibition of EGF-Induced EGFR Phosphorylation by EGFR Parent Antibody or DVD-Ig Constructs In Vitro

[0685] EGFR monoclonal antibodies or DVD-Igs diluted in D-PBS-BSA (Dulbecco's phosphate buffered saline with 0.1% BSA) were added to human carcinoma cells at final concentrations of 0.01 μg/mL-100 μg/mL (180 μL). The plates were incubated at 37° C. in a humidified, 5% CO₂ atmosphere for 1 hour. Growth factors (EGF) at a final concentration of 1-100 ng/mL (20 μL) were added to the cells for 5-15 minutes to stimulate receptor (EGFR) autophosphorylation. Wells without antibody treatment were used as controls of 0% inhibition whereas wells without growth factor stimulation were considered to show 100% inhibition. Cell lysates were made by incubation with cell extraction buffer (10 mM Tris, pH 7.4, 100 mM NaCl, 1 mM EDTA, 1 mM EGTA, 1 mM NaF, 1 mM sodium orthovanadate, 1% Triton X-100, 10% Glycerol, 0.1% SDS, and protease inhibitor cocktail). Phospho-EGFR in these cell lysates was determined using the p-EGFR ELISA kit from R&D Systems (#DYC1095, Minneapolis, Minn.) according to the manufacturer's instructions. Results are shown in Tables 40 and 41.

TABLE 40
Inhibition Of EGF-Induced EGFR Phosphorylation By
Anti-EGFR Parent Antibodies And DVD-Ig Constructs

| Parent | | | N-terminal VD | C-terminal VD |
|---|---|---|---|---|
| Antibody | N-terminal | C-terminal | pEGFR Cellular | pEGFR Cellular |
| or | Variable | Variable | Assay (EGF | Assay (EGF |
| DVD-Ig | Domain | Domain | induced | induced IC50 |
| ID | (VD) | (VD) | IC50 nM) | nM)) |
| AB033 | EGFR | | 7.3 | |
| DVD015 | EGFR | HER-2 | 7.9 | |
| DVD016 | HER-2 | EGFR | | >50 (10% max) |
| AB033 | EGFR | | 7.3 | |
| DVD021 | EGFR | IGF1R | 7.7 | |
| DVD022 | IGF1R | EGFR | | >50 (20% max) |

[0686] DVD-Igs containing the VD from AB033 in either the N-terminal or the C-terminal position showed good inhibition of EGF-induced EGFR phosphorylation. The VD of AB033 in the N-terminal position of DVD-Ig (DVD015, DVD021) blocked EGFR phosphorylation as well as parent antibody AB033.

TABLE 41
Inhibition Of EGF-Induced EGFR Phosphorylation By
Anti-EGFR Parent Antibodies And DVD-Ig Constructs

| | | | N-Terminal | C-Terminal |
|---|---|---|---|---|
| | N- | | Cellular Assay, | Cellular Assay, |
| | terminal | C-terminal | Inhibition Of | Inhibition Of |
| Parent | Variable | Variable | EGF-Induced | EGF-Induced |
| Antibody or | Domain | Domain | phEGFR (IC50, | phEGFR |
| DVD-Ig ID | (VD) | (VD) | nM) | (IC50, nM) |
| AB033 | EGFR | | 0.35 | |
| DVD024 | RON | EGFR | ND | 7.143 |
| DVD023 | EGFR | RON | 0.54 | ND |

[0687] DVD-Igs containing the VD from AB033 in either the N-terminal or the C-terminal position showed good inhibition of EGF-induced EGFR phosphorylation. The VD of AB033 in the N-terminal position of DVD-Ig (DVD023) blocked EGFR phosphorylation as well as parent antibody AB033.

### Example 1.1.2.T

### Inhibition of MSP1-Induced ERK1/2 and AKT Phosphorylation In Vitro by Parent RON Antibody and DVD-Ig Constructs

[0688] Sub-confluent DU145 colon tumor cells grown in 10% FBS/Minimal Essential Medium were trypsinized and seeded into 6-well tissue culture plates (0.25×10⁶ cells/2 ml final volume), and incubated at 37° C., 5% CO₂ for 18-24 hours. After incubation, the cells were washed twice with 1×D-PBS and starved overnight in serum-free medium. The next day, cells were incubated with 900 μl of serum-free media containing 1 μM of monoclonal antibodies or DVD-Igs for 1 hour at 37° C. Following antibody incubation, cells were then treated with 13 nM MSP1 (37° C., 30 minutes). Cells were washed twice with ice-cold D-PBS and harvested in 150 μl Cell Extraction Buffer (Biosource International, Carlsbad, Calif.) containing 100 μl of HALT® phosphatase inhibitor cocktail (Thermo Scientific, Rockford, Ill.), one Complete® EDTA-free protease inhibitor tablet (1 tablet/10 ml, Roche Diagnostic, Mannheim, Germany), and PMSF. Cell lysates were incubated on ice for 30 minutes with intermittent vortexing, pre-cleared by centrifugation (10 min, 14,000 RPM, 4° C.), and processed for Western blot analysis. A total of 15 μg of cell lysate was resolved by SDS-PAGE on a 4-12% NuPage Bis-Tris Gel with 1×MOPS running buffer (Invitrogen, Carlsbad, Calif.). Proteins were transferred onto a nitrocellulose membrane (Invitrogen, Carlsbad, Calif.), and blocked in 5% nonfat milk in TBS-T (1×TBS/0.1% Tween 20) for 1 hour at room temperature. After blocking, membranes were incubated overnight at 4° C. with a 1:1000 dilution of either a rabbit polyclonal phospho-p44/42 MAPK (Thr²⁰²/Tyr²⁰⁴) antibody (Cell Signaling, Danvers, Mass.) or a rabbit monoclonal phospho-AKT (Ser⁴⁷³) antibody (Cell Signaling, Danvers, Mass.). Blots were washed three times (1×TBS-T, 15 minutes), and incubated for 1 hour at room temperature with a 1:5000 dilution of anti-rabbit IgG, HRP-conjugated secondary goat antibody (Jackson Immunoresearch, West Grove, Pa.) in a 5% nonfat milk/TBS-T solution. The blots were washed three times (1×TBS-T, 15 min), and peroxidase conjugated secondary antibody was activated by a 5 min. incubation with SuperSignal West Dura Luminol/Enhancer Solution® (Millipore, Temecula, Calif.), and chemiluminescence was detected and quantified with a Luminescent Image Analyzer LAS-3000 (FUJIFilm, Tokyo, Japan). Band density was determined using MultiGauge Software (FUJIFilm, Tokyo, Japan) and the total chemiluminescent signal was quantified for each band. To determine total ERK1/2 and AKT levels, membranes were stripped for 15 minute with 1× Reblot Plus Strong Solution® (Thermo Scientific, Rockford, Ill.) and reprobed with a 1:1000 dilution of either a rabbit polyclonal p44/42 MAPK antibody (Cell Signaling, Danvers, Mass.) or a rabbit monoclonal AKT antibody (Cell Signaling, Danvers, Mass.), and processed as described above for phospho-antibodies. Ph-ERK and ph-Akt levels were standardized to total ERK or total Akt, respectively.

TABLE 42
Inhibition Of MSP1-Induced ERK1/2 Phosphorylation By
RON Parent Antibodies Or DVD-Ig Constructs

| | | | N-Terminal VD | C-Terminal VD |
|---|---|---|---|---|
| | | | Cellular Assay, | Cellular Assay, |
| Parent | | | Inhibition Of | Inhibition Of |
| Antibody | N-terminal | C-terminal | RON-Induced | RON-Induced |
| or | Variable | Variable | phERK1/2 (% of | phERK1/2 (% of |
| DVD-Ig | Domain | Domain | neutralization @ | neutralization @ |
| ID | (VD) | (VD) | nM Ab) | nM Ab) |
| AB005 | RON | | 80% at 1000 nM | |
| DVD024 | RON | EGFR | 7% at 1000 nM | |
| AB005 | RON | | 80% at 1000 nM | |
| DVD033 | RON | HGF | 60% at 1000 nM | |

[0689] DVD-Igs containing the VD from AB005 in the N-terminal position showed excellent inhibition of MSP1-induced ERK1/2 phosphorylation. The inhibition profile of DVD024 and DVD033 was similar to the inhibition profile of parent antibody AB005.

### Example 1.1.2.U

### Efficacy of a DVD-Ig on the Growth of Human Carcinoma Subcutaneous Flank Xenografts

[0690] A-431 human epidermoid carcinoma cells were grown in vitro to 99% viability, 85% confluence in tissue culture flasks. SCID female mice (Charles Rivers Labs, Wilmington, Mass.) at 19-25 grams were injected subcutaneously into the right flank with 1×10⁶ human tumor cells (1:1 matrigel) on study day 0. Administration (IP, QD, 3×/week) of human IgG control or DVD-Ig was initiated after mice were size matched into groups of mice with mean tumor volumes of approximately 200 to 320 mm³ The tumors were measured twice a week starting on approximately day 10 post tumor cell injection

[0691] Reduction in tumor volume was seen in animals administered EGFR+IGF1/2 DVD Ig relative to tumors in animals that received only control IgG. For two different EGFR+IGF1/2 DVD Ig constructs, % TGIs were 69 and 64 as measured four days after the end of the 3 week dosing phase.

### Example 1.1.2.V

### Binding of Monoclonal Antibodies to the Surface of Human Tumor Cell Lines as Assessed by Flow Cytometry

[0692] Stable cell lines overexpressing a cell-surface antigen of interest or human tumor cell lines were harvested from tissue culture flasks and resuspended in phosphate buffered saline (PBS) containing 5% fetal bovine serum (PBS/FBS). Prior to staining, human tumor cells were incubated on ice with (100 μl) human IgG at 5 μg/ml in PBS/FCS. 1-5×10⁵ cells were incubated with antibody or DVD-Ig (2 μg/mL) in PBS/FBS for 30-60 minutes on ice. Cells were washed twice and 100 μl of F(ab′)2 goat anti human IgG, Fcγ-phycoerythrin (1:200 dilution in PBS) (Jackson ImmunoResearch, West Grove, Pa., Cat. #109-116-170) was added. After 30 minutes incubation on ice, cells were washed twice and resuspended in PBS/FBS. Fluorescence was measured using a Becton Dickinson FACSCalibur (Becton Dickinson, San Jose, Calif.).

[0693] Table 43 shows the FACS data for the DVD-Ig constructs. The geometric mean is the n root of the multiplication product of n fluorescent signals (a1×a2×a3 . . . an). With log-transformed data the geometric mean is used to normalize the weighting of the data distribution. The following table contains the FACS geometric mean of parent antibodies and DVD-Ig constructs.

TABLE 43
Fluorescent Activated Cell Sorting of DVD-Ig Constructs

| | N-terminal | C-terminal | FACS | FACS |
|---|---|---|---|---|
| Parent | Variable | Variable | Geometric | Geometric |
| Antibody or | Domain | Domain | Mean | Mean |
| DVD-Ig ID | (VD) | (VD) | N-terminal | C-terminal |
| AB006 | CD-19 | | 979 | |
| AB001 | CD-20 | | | |
| DVD001 | CD-20 | CD-19 | | 161 |
| DVD002 | CD-19 | CD-20 | 1102 | |
| AB001 | CD-20 | | 95.8 | |
| AB002 | CD-3 | | 461 | |
| DVD003 | CD-20 | CD-3 | 45.9 | 5.7 |
| DVD004 | CD-3 | CD-20 | 673 | 3.59 |
| AB007 | CD-80 | | 25.4 | |
| AB001 | CD-20 | | | |
| DVD005 | CD-20 | CD-80 | | 6 |
| DVD006 | CD-80 | CD-20 | 70.7 | |
| AB002 | CD-3 | | 897 | |
| AB004 | HER-2 | | 27.7 | |
| DVD011 | CD-3 | HER-2 | 1096 | 3.39 |
| DVD012 | HER-2 | CD-3 | 7.14 | 41.6 |
| AB002 | CD-3 | | 461/897 | |
| AB006 | CD-19 | | 661/989 | |
| DVD013 | CD-3 | CD-19 | 417 | 103 |
| DVD014 | CD-19 | CD-3 | 1090 | 23.3 |
| AB033 | EGFR | | 955.4 | |
| AB004 | HER-2 | | 24.77 | |
| DVD015 | EGFR | HER-2 | 1006.4 | 200.07 |
| DVD016 | HER-2 | EGFR | 75.67 | 384.4 |
| AB033 | EGFR | | 955.4 | |
| AB011 | IGF1R | | 1684.5 | |
| DVD021 | EGFR | IGF1R | 888.4 | 733.5 |
| DVD022 | IGF1R | EGFR | 2016.5 | 411.4 |
| AB005 | RON | | 54.46 | |
| AB033 | EGFR | | 955.4 | |
| DVD024 | RON | EGFR | 0.38 | 309.4 |
| DVD023 | EGFR | RON | 1001.4 | 164.96 |
| AB033 | EGFR | | 955.4 | |
| AB012 | HGF | | | |
| DVD025 | EGFR | HGF | 1045.4 | |
| DVD026 | HGF | EGFR | | 143.4 |
| AB004 | HER-2 | | 24.77 | |
| AB010 | IGF1,2 | | | |
| DVD029 | HER-2 | IGF1,2 | 22.37 | |
| DVD030 | IGF1,2 | HER-2 | | 0.23 |
| AB004 | HER-2 | | 24.77 | |
| AB011 | IGF1R | | 1684.5 | |
| DVD031 | HER-2 | IGF1R | 4.99 | 24.7 |
| DVD032 | IGF1R | HER-2 | 34.6 | 4.9 |
| AB005 | RON | | 54.46 | |
| AB012 | HGF | | | |
| DVD033 | RON | HGF | 6.46 | |
| DVD034 | HGF | RON | | 0.39 |
| AB014 | VEGF | | | |
| AB033 | EGFR | | 955.4 | |
| DVD035 | VEGF | EGFR | | 162.4 |
| DVD036 | EGFR | VEGF | 1081.4 | |
| AB014 | VEGF | | | |
| AB004 | HER-2 | | 24.77 | |
| DVD037 | VEGF | HER-2 | | 1.03 |
| DVD038 | HER-2 | VEGF | 7.47 | |
| AB015 | DLL-4 | | 308.27 | |
| AB014 | VEGF | | | |
| DVD044 | DLL4 | VEGF | 297.27 | |
| DVD043 | VEGF | DLL4 | | 68.37 |
| AB014 | VEGF | | | |
| AB012 | HGF | | | |
| DVD045 | VEGF | HGF | | |
| DVD046 | HGF | VEGF | | |
| AB005 | RON | | 54.46 | |
| AB014 | VEGF | | | |
| DVD048 | RON | VEGF | 29.86 | |
| DVD047 | VEGF | RON | | 0.51 |
| AB014 | VEGF | | | |
| AB016 | NRP1 | | 338.4 | |
| DVD049 | VEGF | NRP1 | | 352.4 |
| DVD050 | NRP1 | VEGF | 336.4 | |
| AB015 | DLL-4 | | 308.27 | |
| AB047 | P1GF | | | |
| DVD257 | DLL4 | P1GF | 274.27 | |
| DVD258 | P1GF | DLL4 | | 5.57 |

[0694] All DVDs showed binding to their cell surface targets. The N-terminal domains of DVDs bound their targets on the cell surface as well as or better than the parent antibody. Binding can be restored or improved by adjusting linker length.

### Example 1.1.2.W

### Binding of Parent EGFR Antibody and DVD-Ig Constructs to the Surface of Human Tumor Cell Lines as Assessed by Flow Cytometry

[0695] Stable cell lines overexpressing cell-surface EGFR or human tumor cell lines were harvested from tissue culture flasks and resuspended in Dulbecco's phosphate buffered saline (DPBS) containing 1% fetal calf serum (DPBS/FCS). 1-5×10⁵ cells were incubated with 100 μL antibodies or DVD-Igs (10 ug/mL) in DPBS/FCS for 30-60 minutes on ice. Cells were washed twice and 50 μl of goat anti-human IgG-phycoerythrin (1:50 dilution in DPBS/BSA) (Southern Biotech Associates, Birmingham, Ala. cat#2040-09) was added. After 30-45 minutes incubation on ice, cells were washed twice and resuspended in 125 uL/well 1% formaldehyde in DPBS/FCS. Fluorescence was measured using a Becton Dickinson LSRII (Becton Dickinson, San Jose, Calif.).

TABLE 44
Binding Affinity of anti-EGFR Parent Antibodies and
DVD-Ig Constructs to A431, EGFR Cell Line by FACS

| | | | N-terminal | C-terminal |
|---|---|---|---|---|
| | N-terminal | C-terminal | VD Ag | VD Ag |
| Parent | Variable | Variable | binding A431 | binding A431 |
| Antibody or | Domain | Domain | FACS (EC50, | FACS (EC50, |
| DVD-Ig ID | (VD) | (VD) | nM) | nM) |
| AB005 | RON | | | |
| AB033 | EGFR | | 4.2 | |
| DVD024 | RON | EGFR | ND | 25.43 |
| DVD023 | EGFR | RON | 5.38 | ND |

[0696] All DVDs bound to their cell surface targets. The N-terminal domains of DVDs bound their targets on the cell surface as well as the parent antibody.

TABLE 45
Binding Affinity of anti-EGFR Parent Antibodies and
DVD-Ig Constructs to BAFvar3 Cell Line by FACS

| | N- | C- | | C-terminalVD |
|---|---|---|---|---|
| Parent | terminal | terminal | N-terminal VD | Ag binding |
| Antibody | Variable | Variable | Ag binding | BAFvar3 |
| or DVD-Ig | Domain | Domain | BAFvar3 FACS | FACS |
| ID | (VD) | (VD) | (EC50, nM) | (EC50, nM) |
| AB005 | RON | | | |
| AB033 | EGFR | | 0.5 | |
| DVD024 | RON | EGFR | ND | 17.8 |
| DVD023 | EGFR | RON | 0.6 | ND |

[0697] All DVDs bound to their cell surface targets. The N-terminal domains of DVDs bound their targets on the cell surface as well as the parent antibody.

TABLE 46

Binding Affinity of 7 DLL4/VEGF DVD-Ig Constructs and the Parent
Antibody To 293G-human DLL4 Cell Line by FACS

| | | | | | | | | |
|---|---|---|---|---|---|---|---|---|
| | | | | | | DVD-Ig | | Ref. Ab. |
| | | | | | | DLL4 | | DLL4 |
| | | | | | | Cell | | Cell |
| | | | | | | Binding | | Binding |
| | | | | | Other | FACS | | FACS |
| DVD-Ig | | | HC | LC | DVD- | (EC50, | Ref. | (EC50, |
| ID | Seq. ID | Orientation | linker | linker | Ig VD | nM) | Ab. ID | nM) |

| | | | | | | | | |
|---|---|---|---|---|---|---|---|---|
| DVD470 | DLL4 | C-term. | Long | Long | VEGF | 1.72 | AB015 | 0.50 |
| | (Seq. 1) | | | | (Seq. 1) | | | |
| DVD476 | DLL4 | C-term. | Long | Short | VEGF | 11.72 | AB015 | 0.50 |
| | (Seq. 1) | | | | (Seq. 1) | | | |
| DVD482 | DLL4 | C-term. | Short | Long | VEGF | 3.25 | AB015 | 0.50 |
| | (Seq. 1) | | | | (Seq. 1) | | | |
| DVD474 | DLL4 | C-term. | Long | Long | VEGF | 2.19 | AB015 | 0.50 |
| | (Seq. 1) | | | | (Seq. 2) | | | |
| DVD486 | DLL4 | C-term. | Short | Long | VEGF | 2.09 | AB015 | 0.50 |
| | (Seq. 1) | | | | (Seq. 2) | | | |
| DVD485 | DLL4 | N-term. | Short | Long | VEGF | 0.89 | AB015 | 0.50 |
| | (Seq. 1) | | | | (Seq. 2) | | | |
| DVD471 | DLL4 | N-term. | Long | Long | VEGF | 1.13 | AB015 | 0.50 |
| | (Seq. 1) | | | | (Seq. 3) | | | |

[0698] All DVDs bound to their cell surface target (DLL4). The N- and C-terminal DLL4 binding domains of DVDs bound their targets on the cell surface as well as the parent antibody.

### Example 1.2

### Generation of Parent Monoclonal Antibodies to a Human Antigen of Interest

[0699] Parent mouse mAbs able to bind to and neutralize a human antigen of interest and a variant thereof are obtained as follows:

### Example 1.2.A

### Immunization of Mice With a Human Antigen of Interest

[0700] Twenty micrograms of recombinant purified human antigen (e.g., IGF1,2) mixed with complete Freund's adjuvant or Immunoeasy adjuvant (Qiagen, Valencia, Calif.) is injected subcutaneously into five 6-8 week-old Balb/C, five C57B/6 mice, and five AJ mice on Day 1. On days 24, 38, and 49, twenty micrograms of recombinant purified human antigen variant mixed with incomplete Freund's adjuvant or Immunoeasy adjuvant is injected subcutaneously into the same mice. On day 84 or day 112 or day 144, mice are injected intravenously with 1 μg recombinant purified human antigen of interest.

### Example 1.2.B

### Generation of a Hybridoma

[0701] Splenocytes obtained from the immunized mice described in Example 1.2.A are fused with SP2/O-Ag-14 cells at a ratio of 5:1 according to the established method described in Kohler, G. and Milstein (1975) Nature, 256:495 to generate hybridomas. Fusion products are plated in selection media containing azaserine and hypoxanthine in 96-well plates at a density of 2.5×10⁶ spleen cells per well. Seven to ten days post fusion, macroscopic hybridoma colonies are observed. Supernatant from each well containing hybridoma colonies is tested by ELISA for the presence of antibody to the antigen of interest (as described in Example 1.1.1.A). Supernatants displaying antigen-specific activity are then tested for activity (as described in the assays of Example 1.1.2), for example, the ability to neutralize the antigen of interest in a bioassay such as that described in Example 1.1.2.1).

### Example 1.2.C

### Identification and Characterization of Parent Monoclonal Antibodies to a Human Target Antigen of Interest

### Example 1.2.C.1

### Analyzing Parent Monoclonal Antibody Neutralizing Activity

[0702] Hybridoma supernatants are assayed for the presence of parent antibodies that bind an antigen of interest, generated according to Examples 1.2.A and 1.2.B, and are also capable of binding a variant of the antigen of interest (“antigen variant”). Supernatants with antibodies positive in both assays are then tested for their antigen neutralization potency, for example, in the cytokine bioassay of Example 1.1.2.1. The hybridomas producing antibodies with IC₅₀ values in the bioassay less than 1000 μM, in an embodiment, less than 100 μM are scaled up and cloned by limiting dilution. Hybridoma cells are expanded into media containing 10% low IgG fetal bovine serum (Hyclone #SH30151, Logan, Utah). On average, 250 mL of each hybridoma supernatant (derived from a clonal population) is harvested, concentrated and purified by protein A affinity chromatography, as described in Harlow, E. and Lane, D. 1988 “Antibodies: A Laboratory Manual”. The ability of purified mAbs to inhibit the activity of its target antigen is determined, for example, using the cytokine bioassay as described in Example 1.1.2.1.

### Example 1.2.C.2

### Analyzing Parent Monoclonal Antibody Cross-Reactivity to Cynomolgus Target Antigen of Interest

[0703] To determine whether the selected mAbs described herein recognize cynomolgus antigen of interest, BIACORE analysis is conducted as described herein (Example 1.1.1.G) using recombinant cynomolgus target antigen. In addition, neutralization potencies of mAbs against recombinant cynomolgus antigen of interest may also be measured in the cytokine bioassay (Example 1.1.2.1). MAbs with good cyno cross-reactivity (in an embodiment, within 5-fold of reactivity for human antigen) are selected for future characterization.

### Example 1.2.D

### Determination of the Amino Acid Sequence of the Variable Region for Each Murine Anti-Human Monoclonal Antibody

[0704] Isolation of the cDNAs, expression and characterization of the recombinant anti-human mouse mAbs is conducted as follows. For each amino acid sequence determination, approximately 1×10⁶ hybridoma cells are isolated by centrifugation and processed to isolate total RNA with Trizol (Gibco BRL/Invitrogen, Carlsbad, Calif.) following manufacturer's instructions. Total RNA is subjected to first strand DNA synthesis using the SuperScript First-Strand Synthesis System (Invitrogen, Carlsbad, Calif.) per the manufacturer's instructions. Oligo(dT) is used to prime first-strand synthesis to select for poly(A)+ RNA. The first-strand cDNA product is then amplified by PCR with primers designed for amplification of murine immunoglobulin variable regions (Ig-Primer Sets, Novagen, Madison, Wis.). PCR products are resolved on an agarose gel, excised, purified, and then subcloned with the TOPO Cloning kit into pCR2.1-TOPO vector (Invitrogen, Carlsbad, Calif.) and transformed into TOP10 chemically competent E. coli (Invitrogen, Carlsbad, Calif.). Colony PCR is performed on the transformants to identify clones containing insert. Plasmid DNA is isolated from clones containing insert using a QIAprep Miniprep kit (Qiagen, Valencia, Calif.). Inserts in the plasmids are sequenced on both strands to determine the variable heavy or variable light chain DNA sequences using M13 forward and M13 reverse primers (Fermentas Life Sciences, Hanover Md.). Variable heavy and variable light chain sequences of the mAbs are identified. In an embodiment, the selection criteria for a panel of lead mAbs for next step development (humanization) includes the following:
[0705] The antibody does not contain any N-linked glycosylation sites (NXS), except from the standard one in CH2
[0706] The antibody does not contain any extra cysteines in addition to the normal cysteines in every antibody
[0707] The antibody sequence is aligned with the closest human germline sequences for VH and VL and any unusual amino acids should be checked for occurrence in other natural human antibodies
[0708] N-terminal Glutamine (Q) is changed to Glutamic acid (E) if it does not affect the activity of the antibody. This will reduce heterogeneity due to cyclization of Q
[0709] Efficient signal sequence cleavage is confirmed by Mass Spectrophotometry. This can be done with COS cell or 293 cell material
[0710] The protein sequence is checked for the risk of deamidation of Asn that could result in loss of activity
[0711] The antibody has a low level of aggregation
[0712] The antibody has solubility >5-10 mg/ml (in research phase); >25 mg/ml
[0713] The antibody has a normal size (5-6 nm) by Dynamic Light Scattering (DLS)
[0714] The antibody has a low charge heterogeneity
[0715] The antibody lacks cytokine release (see Example 1.1.2.B)
[0716] The antibody has specificity for the intended cytokine (see Example 1.1.2.C)
[0717] The antibody lacks unexpected tissue cross reactivity (see Example 1.1.2.D)
[0718] The antibody has similarity between human and cynomolgus tissue cross reactivity (see Example 1.1.2.D)

### Example 1.2.2

### Recombinant Humanized Parent Antibodies

### Example 1.2.2.1

### Construction and Expression of Recombinant Chimeric Anti Human Parent Antibodies

[0719] The DNA encoding the heavy chain constant region of murine anti-human parent mAbs is replaced by a cDNA fragment encoding the human IgG1 constant region containing 2 hinge-region amino acid mutations by homologous recombination in bacteria. These mutations are a leucine to alanine change at position 234 (EU numbering) and a leucine to alanine change at position 235 (Lund et al., 1991, J. Immunol., 147:2657). The light chain constant region of each of these antibodies is replaced by a human kappa constant region. Full-length chimeric antibodies are transiently expressed in COS cells by co-transfection of chimeric heavy and light chain cDNAs ligated into the pBOS expression plasmid (Mizushima and Nagata, Nucleic Acids Research 1990, Vol 18, pg 5322). Cell supernatants containing recombinant chimeric antibody are purified by Protein A Sepharose chromatography and bound antibody is eluted by addition of acid buffer. Antibodies are neutralized and dialyzed into PBS.

[0720] The heavy chain cDNA encoding a chimeric mAb is co-transfected with its chimeric light chain cDNA (both ligated in the pBOS vector) into COS cells. Cell supernatant containing recombinant chimeric antibody is purified by Protein A Sepharose chromatography and bound antibody is eluted by addition of acid buffer. Antibodies are neutralized and dialyzed into PBS.

[0721] The purified chimeric anti-human parent mAbs are then tested for their ability to bind (by Biacore) and for functional activity, e.g., to inhibit the cytokine induced production of IgE as described in Examples 1.1.1.G and 1.1.2.B. Chimeric mAbs that maintain the activity of the parent hybridoma mAbs are selected for future development.

### Example 1.2.2.2

### Construction and Expression of Humanized Anti Human Parent Antibodies

### Example 1.2.2.2.A

### Selection of Human Antibody Frameworks

[0722] Each murine variable heavy and variable light chain gene sequence is separately aligned against 44 human immunoglobulin germline variable heavy chain or 46 germline variable light chain sequences (derived from NCBI Ig Blast website at http://www.ncbi.nlm.nih.gov/igblast/retrieveig.html.) using Vector NTI software.

[0723] Humanization is based on amino acid sequence homology, CDR cluster analysis, frequency of use among expressed human antibodies, and available information on the crystal structures of human antibodies. Taking into account possible effects on antibody binding, VH-VL pairing, and other factors, murine residues are mutated to human residues where murine and human framework residues are different, with a few exceptions. Additional humanization strategies are designed based on an analysis of human germline antibody sequences, or a subgroup thereof, that possessed a high degree of homology, i.e., sequence similarity, to the actual amino acid sequence of the murine antibody variable regions.

[0724] Homology modeling is used to identify residues unique to the murine antibody sequences that are predicted to be critical to the structure of the antibody combining site, the CDRs. Homology modeling is a computational method whereby approximate three dimensional coordinates are generated for a protein. The source of initial coordinates and guidance for their further refinement is a second protein, the reference protein, for which the three dimensional coordinates are known and the sequence of which is related to the sequence of the first protein. The relationship among the sequences of the two proteins is used to generate a correspondence between the reference protein and the protein for which coordinates are desired, the target protein. The primary sequences of the reference and target proteins are aligned with coordinates of identical portions of the two proteins transferred directly from the reference protein to the target protein. Coordinates for mismatched portions of the two proteins, e.g., from residue mutations, insertions, or deletions, are constructed from generic structural templates and energy refined to insure consistency with the already transferred model coordinates. This computational protein structure may be further refined or employed directly in modeling studies. The quality of the model structure is determined by the accuracy of the contention that the reference and target proteins are related and the precision with which the sequence alignment is constructed.

[0725] For the murine mAbs, a combination of BLAST searching and visual inspection is used to identify suitable reference structures. Sequence identity of 25% between the reference and target amino acid sequences is considered the minimum necessary to attempt a homology modeling exercise. Sequence alignments are constructed manually and model coordinates are generated with the program Jackal (see Petrey, D. et al. (2003) Proteins 53 (Suppl. 6): 430-435).

[0726] The primary sequences of the murine and human framework regions of the selected antibodies share significant identity. Residue positions that differ are candidates for inclusion of the murine residue in the humanized sequence in order to retain the observed binding potency of the murine antibody. A list of framework residues that differ between the human and murine sequences is constructed manually. Table 47 shows the framework sequences chosen for this study.

TABLE 47

Sequence Of Human IgG Heavy Chain Constant Domain
And Light Chain Constant Domain

| | | |
|---|---|---|
| | SEQ | Sequence |
| Protein | ID NO | 12345678901234567890123456789012345678901 |

| | | |
|---|---|---|
| Wild type hIgG1 | 108 | ASTKGPSVFPLAPSSKSTSGGTAALGCLVKDYFPEPVTVSW |
| constant region | | NSGALTSGVHTFPAVLQSSGLYSLSSVVTVPSSSLGTQTYI |
| | | CNVNHKPSNTKVDKKVEPKSCDKTHTCPPCPAPELLGGPSV |
| | | FLFPPKPKDTLMISRTPEVTCVVVDVSHEDPEVKFNWYVDG |
| | | VEVHNAKTKPREEQYNSTYRVVSVLTVLHQDWLNGKEYKCK |
| | | VSNKALPAPIEKTISKAKGQPREPQVYTLPPSREEMTKNQV |
| | | SLTCLVKGFYPSDIAVEWESNGQPENNYKTTPPVLDSDGSF |
| | | FLYSKLTVDKSRWQQGNVFSCSVMHEALHNHYTQKSLSLSP |
| | | GK |
| Mutant hIgG1 constant | 109 | ASTKGPSVFPLAPSSKSTSGGTAALGCLVKDYFPEPVTVSW |
| region | | NSGALTSGVHTFPAVLQSSGLYSLSSVVTVPSSSLGTQTYI |
| | | CNVNHKPSNTKVDKKVEPKSCDKTHTCPPCPAPEAAGGPSV |
| | | FLFPPKPKDTLMISRTPEVTCVVVDVSHEDPEVKFNWYVDG |
| | | VEVHNAKTKPREEQYNSTYRVVSVLTVLHQDWLNGKEYKCK |
| | | VSNKALPAPIEKTISKAKGQPREPQVYTLPPSREEMTKNQV |
| | | SLTCLVKGFYPSDIAVEWESNGQPENNYKTTPPVLDSDGSF |
| | | FLYSKLTVDKSRWQQGNVFSCSVMHEALHNHYTQKSLSLSP |
| | | GK |
| Ig kappa constant | 110 | TVAAPSVFIFPPSDEQLKSGTASVVCLLNNFYPREAKVQWK |
| region | | VDNALQSGNSQESVTEQDSKDSTYSLSSTLTLSKADYEKHK |
| | | VYACEVTHQGLSSPVTKSFNRGEC |
| Ig Lambda | 111 | QPKAAPSVTLFPPSSEELQANKATLVCLISDFYPGAVTVAW |
| constant region | | KADSSPVKAGVETTTPSKQSNNKYAASSYLSLTPEQWKSHR |
| | | SYSCQVTHEGSTVEKTVAPTECS |

[0727] The likelihood that a given framework residue would impact the binding properties of the antibody depends on its proximity to the CDR residues. Therefore, using the model structures, the residues that differ between the murine and human sequences are ranked according to their distance from any atom in the CDRs. Those residues that fell within 4.5 Å of any CDR atom are identified as most important and are recommended to be candidates for retention of the murine residue in the humanized antibody (i.e., back mutation).

[0728] In silico constructed humanized antibodies are constructed using oligonucleotides. For each variable region cDNA, 6 oligonucleotides of 60-80 nucleotides each are designed to overlap each other by 20 nucleotides at the 5′ and/or 3′ end of each oligonucleotide. In an annealing reaction, all 6 oligonucleotides are combined, boiled, and annealed in the presence of dNTPs. DNA polymerase I, Large (Klenow) fragment (New England Biolabs #M0210, Beverley, Mass.) is added to fill-in the approximately 40 bp gaps between the overlapping oligonucleotides. PCR is performed to amplify the entire variable region gene using two outermost primers containing overhanging sequences complementary to the multiple cloning site in a modified pBOS vector (Mizushima, S, and Nagata, S. (1990) Nucleic Acids Res. 18: 17). The PCR products derived from each cDNA assembly are separated on an agarose gel and the band corresponding to the predicted variable region cDNA size is excised and purified. The variable heavy region is inserted in-frame onto a cDNA fragment encoding the human IgG1 constant region containing 2 hinge-region amino acid mutations by homologous recombination in bacteria. These mutations are a leucine to alanine change at position 234 (EU numbering) and a leucine to alanine change at position 235 (Lund et al. (1991) J. Immunol. 147:2657). The variable light chain region is inserted in-frame with the human kappa constant region by homologous recombination. Bacterial colonies are isolated and plasmid DNA extracted. cDNA inserts are sequenced in their entirety. Correct humanized heavy and light chains corresponding to each antibody are co-transfected into COS cells to transiently produce full-length humanized anti-human antibodies. Cell supernatants containing recombinant chimeric antibody are purified by Protein A Sepharose chromatography and bound antibody is eluted by addition of acid buffer. Antibodies are neutralized and dialyzed into PBS.

### Example 1.2.2.3

### Characterization of Humanized Antibodies

[0729] The ability of purified humanized antibodies to inhibit a functional activity is determined, e.g., using the cytokine bioassay as described in Examples 1.1.2.A. The binding affinities of the humanized antibodies to recombinant human antigen are determined using surface plasmon resonance (Biacore®) measurement as described in Example 1.1.1.B. The IC₅₀ values from the bioassays and the affinity of the humanized antibodies are ranked. The humanized mAbs that fully maintain the activity of the parent hybridoma mAbs are selected as candidates for future development. The top 2-3 most favorable humanized mAbs are further characterized.

### Example 1.2.2.3.A

### Pharmacokinetic Analysis of Humanized Antibodies

[0730] Pharmacokinetic studies are carried out in Sprague-Dawley rats and cynomolgus monkeys. Male and female rats and cynomolgus monkeys are dosed intravenously or subcutaneously with a single dose of 4 mg/kg mAb and samples are analyzed using antigen capture ELISA, and pharmacokinetic parameters are determined by noncompartmental analysis. Briefly, ELISA plates are coated with goat anti-biotin antibody (5 mg/ml, 4° C., overnight), blocked with Superblock (Pierce), and incubated with biotinylated human antigen at 50 ng/ml in 10% Superblock TTBS at room temperature for 2 hours. Serum samples are serially diluted (0.5% serum, 10% Superblock in TTBS) and incubated on the plate for 30 minutes at room temperature. Detection is carried out with HRP-labeled goat anti human antibody and concentrations are determined with the help of standard curves using the four parameter logistic fit. Values for the pharmacokinetic parameters are determined by non-compartmental model using WinNonlin software (Pharsight Corporation, Mountain View, Calif.). Humanized mAbs with good pharmacokinetics profile (T1/2 is 8-13 days or better, with low clearance and excellent bioavailability 50-100%) are selected.

### Example 1.2.2.3.B

### Physicochemical and In Vitro Stability Analysis of Humanized Monoclonal Antibodies

### Size Exclusion Chromatography

[0731] Antibodies are diluted to 2.5 mg/mL with water and 20 mL is analyzed on a Shimadzu HPLC system using a TSK gel G3000 SWXL column (Tosoh Bioscience, cat# k5539-05k). Samples are eluted from the column with 211 mM sodium sulfate, 92 mM sodium phosphate, pH 7.0, at a flow rate of 0.3 mL/minutes. The HPLC system operating conditions are the following:
[0732] Mobile phase: 211 mM Na₂SO₄, 92 mM Na₂HPO₄*7H₂O, pH 7.0
[0733] Gradient: Isocratic
[0734] Flow rate: 0.3 mL/minute
[0735] Detector wavelength: 280 nm
[0736] Autosampler cooler temp: 4° C.
[0737] Column oven temperature: Ambient
[0738] Run time: 50 minutes

[0739] Table 48 contains purity data of parent antibodies and DVD-Ig constructs expressed as percent monomer (unaggregated protein of the expected molecular weight) as determined by the above protocol.

TABLE 48
Purity of Parent Antibodies and DVD-Ig Constructs
as Determined by Size Exclusion Chromatography

| | N-terminal | C-terminal | |
|---|---|---|---|
| | Variable | Variable | |
| Parent Antibody | Domain | Domain | |
| or DVD-Ig ID | (VD) | (VD) | % Monomer (purity) |
| AB033 | EGFR | | 99.75 |
| AB004 | HER-2 | | 95.6 |
| DVD015 | EGFR | HER-2 | 96.98 |
| DVD016 | HER-2 | EGFR | 93.41 |
| AB033 | EGFR | | 99.75 |
| AB011 | IGF1R | | 98.23 |
| DVD021 | EGFR | IGF1R | 99.25 |
| DVD022 | IGF1R | EGFR | 99.53 |
| AB005 | RON | | 79.34 |
| AB033 | EGFR | | 99.75 |
| DVD024 | RON | EGFR | 96.86 |
| DVD023 | EGFR | RON | 97.27 |
| AB033 | EGFR | | 99.75 |
| AB012 | HGF | | 98.97 |
| DVD025 | EGFR | HGF | 99.21 |
| DVD026 | HGF | EGFR | 99.48 |
| AB004 | HER-2 | | 95.6 |
| AB010 | IGF1,2 | | 93.2 |
| DVD029 | HER-2 | IGF1,2 | 88.2 |
| DVD030 | IGF1,2 | HER-2 | 96.9 |
| AB004 | HER-2 | | 95.6 |
| AB011 | IGF1R | | 98.23 |
| DVD031 | HER-2 | IGF1R | 94.53 |
| DVD032 | IGF1R | HER-2 | 98.1 |
| AB005 | RON | | 79.34 |
| AB012 | HGF | | 98.97 |
| DVD033 | RON | HGF | 100 |
| DVD034 | HGF | RON | 100 |
| AB014 | VEGF | | 97.81 |
| AB033 | EGFR | | 99.75 |
| DVD035 | VEGF | EGFR | 97.7 |
| DVD036 | EGFR | VEGF | 99.36 |
| AB014 | VEGF | | 97.81 |
| AB004 | HER-2 | | 95.6 |
| DVD037 | VEGF | HER-2 | 45.4 |
| DVD038 | HER-2 | VEGF | 96.9 |
| AB014 | VEGF | | 97.81 |
| AB010 | IGF1,2 | | 93.2 |
| DVD041 | VEGF | IGF1,2 | 94.7 |
| DVD042 | IGF1,2 | VEGF | 92.4 |
| AB015 | DLL-4 | | 97.52 |
| AB014 | VEGF | | 97.81 |
| DVD044 | DLL4 | VEGF | 48.66 |
| DVD043 | VEGF | DLL4 | 96.72 |
| AB014 | VEGF | | 97.81 |
| AB012 | HGF | | 98.97 |
| DVD045 | VEGF | HGF | 97.88 |
| DVD046 | HGF | VEGF | 98.14 |
| AB005 | RON | | 79.34 |
| AB014 | VEGF | | 97.81 |
| DVD048 | RON | VEGF | 100 |
| DVD047 | VEGF | RON | 100 |
| AB014 | VEGF | | 97.81 |
| AB016 | NRP1 | | 93.54 |
| DVD049 | VEGF | NRP1 | 97.74 |
| DVD050 | NRP1 | VEGF | 98.59 |
| AB015 | DLL-4 | | 97.52 |
| AB047 | PlGF | | 99.47 |
| DVD257 | DLL4 | PlGF | 83.8 |
| DVD258 | PlGF | DLL4 | 100 |
| AB014 | VEGF | | 97.81 |
| AB047 | PlGF | | 99.47 |
| DVD259 | VEGF | PlGF | 90.61 |
| DVD260 | PlGF | VEGF | 98.57 |
| AB062 | ErbB3 | | 100 |
| AB033 | EGFR | | 99.75 |
| DVD299 | ErbB3 | EGFR | 98.8 |
| DVD300 | EGFR | ErbB3 | 100 |
| AB063 | ErbB3 | | 96 |
| AB033 | EGFR | | 99.75 |
| DVD305 | ErbB3 | EGFR | 83.8 |
| DVD306 | EGFR | ErbB3 | 100 |

[0740] DVD-Igs showed an excellent SEC profile with most DVD-Ig showing >90% monomer. This DVD-Ig profile is similar to that observed for parent antibodies.

TABLE 49

Purity of VEGF/DLL4 DVD-Ig Constructs as Determined
by Size Exclusion Chromatography

| | | | | | | |
|---|---|---|---|---|---|---|
| | | | HC | LC | Other DVD | % |
| DVD ID | Sequence ID | Position | Linker | Linker | Domain | Monomer |

| | | | | | | |
|---|---|---|---|---|---|---|
| DVD043 | VEGF (Seq. 1) | N-term. | Short | Short | DLL4 (seq. 1) | 96.8 |
| DVD044 | VEGF (Seq. 1) | C-term. | Short | Short | DLL4 (seq. 1) | 51.4 |
| DVD469 | VEGF (Seq. 1) | C-term. | Long | Long | DLL4 (seq. 1) | 44.5 |
| DVD470 | VEGF (Seq. 1) | N-term. | Long | Long | DLL4 (seq. 1) | 96.0 |
| DVD475 | VEGF (Seq. 1) | C-term. | Long | Short | DLL4 (seq. 1) | 47.3 |
| DVD476 | VEGF (Seq. 1) | N-term. | Long | Short | DLL4 (seq. 1) | 97.6 |
| DVD481 | VEGF (Seq. 1) | C-term. | Short | Long | DLL4 (seq. 1) | |
| DVD482 | VEGF (Seq. 1) | N-term. | Short | Long | DLL4 (seq. 1) | 95.9 |
| DVD467 | VEGF (Seq. 2) | C-term. | Short | Short | DLL4 (seq. 1) | 70.1 |
| DVD468 | VEGF (Seq. 2) | N-term. | Short | Short | DLL4 (seq. 1) | 90.5 |
| DVD473 | VEGF (Seq. 2) | C-term. | Long | Long | DLL4 (seq. 1) | 96.8 |
| DVD474 | VEGF (Seq. 2) | N-term. | Long | Long | DLL4 (seq. 1) | 95.3 |
| DVD479 | VEGF (Seq. 2) | C-term. | Long | Short | DLL4 (seq. 1) | |
| DVD480 | VEGF (Seq. 2) | N-term. | Long | Short | DLL4 (seq. 1) | 94.1 |
| DVD485 | VEGF (Seq. 2) | C-term. | Short | Long | DLL4 (seq. 1) | 96.5 |
| DVD486 | VEGF (Seq. 2) | N-term. | Short | Long | DLL4 (seq. 1) | 95.5 |
| DVD465 | VEGF (Seq. 3) | C-term. | Short | Short | DLL4 (seq. 1) | 80.6 |
| DVD466 | VEGF (Seq. 3) | N-term. | Short | Short | DLL4 (seq. 1) | 91.5 |
| DVD471 | VEGF (Seq. 3) | C-term. | Long | Long | DLL4 (seq. 1) | 78.8 |
| DVD472 | VEGF (Seq. 3) | N-term. | Long | Long | DLL4 (seq. 1) | 85.4 |
| DVD477 | VEGF (Seq. 3) | C-term. | Long | Short | DLL4 (seq. 1) | 79.2 |
| DVD478 | VEGF (Seq. 3) | N-term. | Long | Short | DLL4 (seq. 1) | 91.0 |
| DVD483 | VEGF (Seq. 3) | C-term. | Short | Long | DLL4 (seq. 1) | 76.9 |
| DVD484 | VEGF (Seq. 3) | N-term. | Short | Long | DLL4 (seq. 1) | 90.1 |

[0741] DVD-Igs showed an excellent SEC profile with most DVD-Ig showing >90% monomer. This DVD-Ig profile is similar to that observed for parent antibodies.

### SDS-PAGE

[0742] Antibodies are analyzed by sodium dodecyl sulfate-polyacrylamide gel electrophoresis (SDS-PAGE) under both reducing and non-reducing conditions. Adalimumab lot AFP04C is used as a control. For reducing conditions, the samples are mixed 1:1 with 2× tris glycine SDS-PAGE sample buffer (Invitrogen, cat# LC2676, lot# 1323208) with 100 mM DTT, and heated at 60° C. for 30 minutes. For non-reducing conditions, the samples are mixed 1:1 with sample buffer and heated at 100° C. for 5 minutes. The reduced samples (10 mg per lane) are loaded on a 12% pre-cast tris-glycine gel (Invitrogen, cat# EC6005box, lot# 6111021), and the non-reduced samples (10 mg per lane) are loaded on an 8%-16% pre-cast tris-glycine gel (Invitrogen, cat# EC6045box, lot# 6111021). SeeBlue Plus 2 (Invitrogen, cat#LC5925, lot# 1351542) is used as a molecular weight marker. The gels are run in a XCell SureLock mini cell gel box (Invitrogen, cat# E10001) and the proteins are separated by first applying a voltage of 75 to stack the samples in the gel, followed by a constant voltage of 125 until the dye front reached the bottom of the gel. The running buffer used is 1× tris glycine SDS buffer, prepared from a 10× tris glycine SDS buffer (ABC, MPS-79-080106)). The gels are stained overnight with colloidal blue stain (Invitrogen cat# 46-7015, 46-7016) and destained with Milli-Q water until the background is clear. The stained gels are then scanned using an Epson Expression scanner (model 1680, S/N DASX003641).

### Sedimentation Velocity Analysis

[0743] Antibodies are loaded into the sample chamber of each of three standard two-sector carbon epon centerpieces. These centerpieces have a 1.2 cm optical path length and are built with sapphire windows. PBS is used for a reference buffer and each chamber contained 140 μL. All samples are examined simultaneously using a 4-hole (AN-60Ti) rotor in a Beckman ProteomeLab XL-I analytical ultracentrifuge (serial # PL106C01).

[0744] Run conditions are programmed and centrifuge control is performed using ProteomeLab (v5.6). The samples and rotor are allowed to thermally equilibrate for one hour prior to analysis (20.0±0.1° C.). Confirmation of proper cell loading is performed at 3000 rpm and a single scan is recorded for each cell. The sedimentation velocity conditions are the following:

[0745] Sample Cell Volume: 420 mL

[0746] Reference Cell Volume: 420 mL

[0747] Temperature: 20° C.

[0748] Rotor Speed: 35,000 rpm

[0749] Time: 8:00 hours

[0750] UV Wavelength: 280 nm

[0751] Radial Step Size: 0.003 cm

[0752] Data Collection One data point per step without signal averaging.

[0753] Total Number of Scans: 100

### LC-MS Molecular Weight Measurement of Intact Antibodies

[0754] Molecular weight of intact antibodies are analyzed by LC-MS. Each antibody is diluted to approximately 1 mg/mL with water. An 1100 HPLC (Agilent) system with a protein microtrap (Michrom Bioresources, Inc, cat# 004/25109/03) is used to desalt and introduce 5 mg of the sample into an API Qstar pulsar i mass spectrometer (Applied Biosystems). A short gradient is used to elute the samples. The gradient is run with mobile phase A (0.08% FA, 0.02% TFA in HPLC water) and mobile phase B (0.08% FA and 0.02% TFA in acetonitrile) at a flow rate of 50 mL/minute. The mass spectrometer is operated at 4.5 kvolts spray voltage with a scan range from 2000 to 3500 mass to charge ratio.

### LC-MS Molecular Weight Measurement of Antibody Light and Heavy Chains

[0755] Molecular weight measurement of antibody light chain (LC), heavy chain (HC) and deglycosylated HC are analyzed by LC-MS. Aantibody is diluted to 1 mg/mL with water and the sample is reduced to LC and HC with a final concentration of 10 mM DTT for 30 minutes at 37° C. To deglycosylate the antibody, 100 mg of the antibody is incubated with 2 mL of PNGase F, 5 mL of 10% N-octylglucoside in a total volume of 100 mL overnight at 37° C. After deglycosylation the sample is reduced with a final concentration of 10 mM DTT for 30 minutes at 37° C. An Agilent 1100 HPLC system with a C4 column (Vydac, cat# 214TP5115, S/N 060206537204069) is used to desalt and introduce the sample (5 mg) into an API Qstar pulsar i mass spectrometer (Applied Biosystems). A short gradient is used to elute the sample. The gradient is run with mobile phase A (0.08% FA, 0.02% TFA in HPLC water) and mobile phase B (0.08% FA and 0.02% TFA in acetonitrile) at a flow rate of 50 mL/minute. The mass spectrometer is operated at 4.5 kvolts spray voltage with a scan range from 800 to 3500 mass to charge ratio.

### Peptide Mapping

[0756] Antibody is denatured for 15 minutes at room temperature with a final concentration of 6 M guanidine hydrochloride in 75 mM ammonium bicarbonate. The denatured samples are reduced with a final concentration of 10 mM DTT at 37° C. for 60 minutes, followed by alkylation with 50 mM iodoacetic acid (IAA) in the dark at 37° C. for 30 minutes. Following alkylation, the sample is dialyzed overnight against four liters of 10 mM ammonium bicarbonate at 4° C. The dialyzed sample is diluted to 1 mg/mL with 10 mM ammonium bicarbonate, pH 7.8 and 100 mg of antibody is either digested with trypsin (Promega, cat# V5111) or Lys-C (Roche, cat# 11 047 825 001) at a 1:20 (w/w) trypsin/Lys-C:antibody ratio at 37° C. for 4 hrs. Digests are quenched with 1 mL of 1 N HCl. For peptide mapping with mass spectrometer detection, 40 mL of the digests are separated by reverse phase high performance liquid chromatography (RPHPLC) on a C18 column (Vydac, cat# 218TP51, S/N NE9606 10.3.5) with an Agilent 1100 HPLC system. The peptide separation is run with a gradient using mobile phase A (0.02% TFA and 0.08% FA in HPLC grade water) and mobile phase B (0.02% TFA and 0.08% FA in acetonitrile) at a flow rate of 50 mL/minutes. The API QSTAR Pulsar i mass spectromer is operated in positive mode at 4.5 kvolts spray voltage and a scan range from 800 to 2500 mass to charge ratio.

### Disulfide Bond Mapping

[0757] To denature the antibody, 100 mL of the antibody is mixed with 300 mL of 8 M guanidine HCl in 100 mM ammonium bicarbonate. The pH is checked to ensure that it is between 7 and 8 and the samples are denatured for 15 minutes at room temperature in a final concentration of 6 M guanidine HCl. A portion of the denatured sample (100 mL) is diluted to 600 mL with Milli-Q water to give a final guanidine-HCl concentration of 1 M. The sample (220 mg) is digested with either trypsin (Promega, cat #V5111, lot# 22265901) or Lys-C (Roche, cat# 11047825001, lot# 12808000) at a 1:50 trypsin or 1:50 Lys-C: antibody (w/w) ratios (4.4 mg enzyme: 220 mg sample) at 37° C. for approximately 16 hours. An additional 5 mg of trypsin or Lys-C is added to the samples and digestion is allowed to proceed for an additional 2 hours at 37° C. Digestions are stopped by adding 1 mL of TFA to each sample. Digested samples are separated by RPHPLC using a C18 column (Vydac, cat# 218TP51 S/N NE020630-4-1A) on an Agilent HPLC system. The separation is run with the same gradient used for peptide mapping using mobile phase A (0.02% TFA and 0.08% FA in HPLC grade water) and mobile phase B (0.02% TFA and 0.08% FA in acetonitrile) at a flow rate of 50 mL/minute. The HPLC operating conditions are the same as those used for peptide mapping. The API QSTAR Pulsar i mass spectromer is operated in positive mode at 4.5 kvolts spray voltage and a scan range from 800 to 2500 mass-to-charge ratio. Disulfide bonds are assigned by matching the observed MWs of peptides with the predicted MWs of tryptic or Lys-C peptides linked by disulfide bonds.

### Free Sulfhydryl Determination

[0758] The method used to quantify free cysteines in an antibody is based on the reaction of Ellman's reagent, 5,5¢-dithio-bis(2-nitrobenzoic acid) (DTNB), with sulfhydryl groups (SH) which gives rise to a characteristic chromophoric product, 5-thio-(2-nitrobenzoic acid) (TNB). The reaction is illustrated in the formula:

DTNB+RSH®RS-TNB+TNB−+H+

[0759] The absorbance of the TNB− is measured at 412 nm using a Cary 50 spectrophotometer. An absorbance curve is plotted using dilutions of 2 mercaptoethanol (b-ME) as the free SH standard and the concentrations of the free sulfhydryl groups in the protein are determined from absorbance at 412 nm of the sample.

[0760] The b-ME standard stock is prepared by a serial dilution of 14.2 M b-ME with HPLC grade water to a final concentration of 0.142 mM. Then standards in triplicate for each concentration are prepared. Antibody is concentrated to 10 mg/mL using an amicon ultra 10,000 MWCO centrifugal filter (Millipore, cat# UFC801096, lot# L3KN5251) and the buffer is changed to the formulation buffer used for adalimumab (5.57 mM sodium phosphate monobasic, 8.69 mM sodium phosphate dibasic, 106.69 mM NaCl, 1.07 mM sodium citrate, 6.45 mM citric acid, 66.68 mM mannitol, pH 5.2, 0.1% (w/v) Tween). The samples are mixed on a shaker at room temperature for 20 minutes. Then 180 mL of 100 mM Tris buffer, pH 8.1 is added to each sample and standard followed by the addition of 300 mL of 2 mM DTNB in 10 mM phosphate buffer, pH 8.1. After thorough mixing, the samples and standards are measured for absorption at 412 nm on a Cary 50 spectrophotometer. The standard curve is obtained by plotting the amount of free SH and OD₄₁₂ nm of the b-ME standards. Free SH content of samples are calculated based on this curve after subtraction of the blank.

### Weak Cation Exchange Chromatography

[0761] Antibody is diluted to 1 mg/mL with 10 mM sodium phosphate, pH 6.0. Charge heterogeneity is analyzed using a Shimadzu HPLC system with a WCX-10 ProPac analytical column (Dionex, cat# 054993, S/N 02722). The samples are loaded on the column in 80% mobile phase A (10 mM sodium phosphate, pH 6.0) and 20% mobile phase B (10 mM sodium phosphate, 500 mM NaCl, pH 6.0) and eluted at a flow rate of 1.0 mL/minute.

### Oligosaccharide Profiling

[0762] Oligosaccharides released after PNGase F treatment of antibody are derivatized with 2-aminobenzamide (2-AB) labeling reagent. The fluorescent-labeled oligosaccharides are separated by normal phase high performance liquid chromatography (NPHPLC) and the different forms of oligosaccharides are characterized based on retention time comparison with known standards.

[0763] The antibody is first digested with PNGaseF to cleave N-linked oligosaccharides from the Fc portion of the heavy chain. The antibody (200 mg) is placed in a 500 mL Eppendorf tube along with 2 mL PNGase F and 3 mL of 10% N-octylglucoside. Phosphate buffered saline is added to bring the final volume to 60 mL. The sample is incubated overnight at 37° C. in an Eppendorf thermomixer set at 700 RPM. Adalimumab lot AFP04C is also digested with PNGase F as a control.

[0764] After PNGase F treatment, the samples are incubated at 95° C. for 5 minutes in an Eppendorf thermomixer set at 750 RPM to precipitate out the proteins, then the samples are placed in an Eppendorf centrifuge for 2 minutes at 10,000 RPM to spin down the precipitated proteins. The supernatant containing the oligosaccharides are transferred to a 500 mL Eppendorf tube and dried in a speed-vac at 65° C.

[0765] The oligosaccharides are labeled with 2AB using a 2AB labeling kit purchased from Prozyme (cat# GKK-404, lot# 132026). The labeling reagent is prepared according to the manufacturer's instructions. Acetic acid (150 mL, provided in kit) is added to the DMSO vial (provided in kit) and mixed by pipeting the solution up and down several times. The acetic acid/DMSO mixture (100 mL) is transferred to a vial of 2-AB dye (just prior to use) and mixed until the dye is fully dissolved. The dye solution is then added to a vial of reductant (provided in kit) and mixed well (labeling reagent). The labeling reagent (5 mL) is added to each dried oligosaccharide sample vial, and mixed thoroughly. The reaction vials are placed in an Eppendorf thermomixer set at 65° C. and 700-800 RPM for 2 hours of reaction.

[0766] After the labeling reaction, the excess fluorescent dye is removed using GlycoClean S Cartridges from Prozyme (cat# GKI-4726). Prior to adding the samples, the cartridges are washed with 1 mL of milli-Q water followed with 5 ishes of 1 mL 30% acetic acid solution. Just prior to adding the samples, 1 mL of acetonitrile (Burdick and Jackson, cat# AH015-4) is added to the cartridges.

[0767] After all of the acetonitrile passed through the cartridge, the sample is spotted onto the center of the freshly washed disc and allowed to adsorb onto the disc for 10 minutes. The disc is washed with 1 mL of acetonitrile followed by five ishes of 1 mL of 96% acetonitrile. The cartridges are placed over a 1.5 mL Eppendorf tube and the 2-AB labeled oligosaccharides are eluted with 3 ishes (400 mL each ish) of milli Q water.

[0768] The oligosaccharides are separated using a Glycosep N HPLC (cat# GKI-4728) column connected to a Shimadzu HPLC system. The Shimadzu HPLC system consisted of a system controller, degasser, binary pumps, autosampler with a sample cooler, and a fluorescent detector.

### Stability at Elevated Temperatures

[0769] The buffer of antibody is either 5.57 mM sodium phosphate monobasic, 8.69 mM sodium phosphate dibasic, 106.69 mM NaCl, 1.07 mM sodium citrate, 6.45 mM citric acid, 66.68 mM mannitol, 0.1% (w/v) Tween, pH 5.2; or 10 mM histidine, 10 mM methionine, 4% mannitol, pH 5.9 using Amicon ultra centrifugal filters. The final concentration of the antibodies is adjusted to 2 mg/mL with the appropriate buffers. The antibody solutions are then filter sterized and 0.25 mL aliquots are prepared under sterile conditions. The aliquots are left at either −80° C., 5° C., 25° C., or 40° C. for 1, 2 or 3 weeks. At the end of the incubation period, the samples are analyzed by size exclusion chromatography and SDS-PAGE.

[0770] The stability samples are analyzed by SDS-PAGE under both reducing and non-reducing conditions. The procedure used is the same as described herein. The gels are stained overnight with colloidal blue stain (Invitrogen cat# 46-7015, 46-7016) and destained with Milli-Q water until the background is clear. The stained gels are then scanned using an Epson Expression scanner (model 1680, S/N DASX003641). To obtain more sensitivity, the same gels are silver stained using silver staining kit (Owl Scientific) and the recommended procedures given by the manufacturer is used.

### Example 1.2.2.3.C

### Efficacy of a Humanized Monoclonal Antibody by Itself or in Combination with Chemotherapy on the Growth of Human Carcinoma Xenografts

[0771] Human cancer cells are grown in vitro to 99% viability, 85% confluence in tissue culture flasks. SCID female or male mice (Charles Rivers Labs) at 19-25 grams, are ear tagged and shaved. Mice are then inoculated subcutaneously into the right flank with 0.2 ml of 2×10⁶ human tumor cells (1:1 matrigel) on study day 0. Administration (IP, Q3D/week) of vehicle (PBS), humanized antibody, and/or chemotherapy is initiated after mice are size matched into separate cages of mice with mean tumor volumes of approximately 150 to 200 mm³ The tumors are measured by a pair of calipers twice a week starting on approximately day 10 post inoculation and the tumor volumes calculated according to the formula V=L×W²/2 (V: volume, mm³; L: length, mm; W: width, m) Reduction in tumor volume is seen in animals treated with mAb alone or in combination with chemotherapy relative to tumors in animals that received only vehicle or an isotype control mAb.

### Example 1.4

### Generation of a DVD-Ig

[0772] DVD-Ig molecules capable of binding two antigens are constructed using two parent monoclonal antibodies, one against human antigen A, and the other against human antigen B, selected as described herein.

### Example 1.4.1

### Generation of a DVD-Ig Having Two Linker Lengths

[0773] A constant region containing μl Fc with mutations at 234, and 235 to eliminate ADCC/CDC effector functions is used. Four different anti-A/B DVD-Ig constructs are generated: 2 with short linker and 2 with long linker, each in two different domain orientations: V_{A}-V_{B}-C and V_{B}-V_{A}-C (see Table 50). The linker sequences, derived from the N-terminal sequence of human Cl/Ck or CH1 domain, are as follows:

[0774] For DVDAB constructs:

[0775] light chain (if anti-A has λ): Short linker: QPKAAP; Long linker: QPKAAPSVTLFPP

[0776] light chain (if anti-A has κ): Short linker: TVAAP; Long linker: TVAAPSVFIFPP

[0777] heavy chain (γ1): Short linker: ASTKGP; Long linker: ASTKGPSVFPLAP

[0778] For DVDBA constructs:

[0779] light chain (if anti-B has λ): Short linker: QPKAAP; Long linker: QPKAAPSVTLFPP

[0780] light chain (if anti-B has k): Short linker: TVAAP; Long linker: TVAAPSVFIFPP

[0781] heavy chain (γ1): Short linker: ASTKGP; Long linker: ASTKGPSVFPLAP

[0782] Heavy and light chain constructs are subcloned into the pBOS expression vector, and expressed in COS cells, followed by purification by Protein A chromatography. The purified materials are subjected to SDS-PAGE and SEC analysis.

[0783] Table 50 describes the heavy chain and light chain constructs used to express each anti-A/B DVD-Ig protein.

TABLE 50
Anti-A/B DVD-Ig Constructs

| DVD-Ig protein | Heavy chain construct | Light chain construct |
|---|---|---|
| DVDABSL | DVDABHC-SL | DVDABLC-SL |
| DVDABLL | DVDABHC-LL | DVDABLC-LL |
| DVDBASL | DVDBAHC-SL | DVDBALC-SL |
| DVDBALL | DVDBAHC-LL | DVDBALC-LL |

### Example 1.4.2

### Molecular Cloning of DNA Constructs for DVDABSL and DVDABLL

[0784] To generate heavy chain constructs DVDABHC-LL and DVDABHC-SL, VH domain of A antibody is PCR amplified using specific primers (3′ primers contain short/long liner sequence for SL/LL constructs, respectively); meanwhile VH domain of B antibody is amplified using specific primers (5′ primers contains short/long liner sequence for SL/LL constructs, respectively). Both PCR reactions are performed according to standard PCR techniques and procedures. The two PCR products are gel-purified, and used together as overlapping template for the subsequent overlapping PCR reaction. The overlapping PCR products are subcloned into Srf I and Sal I double digested pBOS-hCγ1,z non-a mammalian expression vector (Abbott) by using standard homologous recombination approach.

[0785] To generate light chain constructs DVDABLC-LL and DVDABLC-SL, VL domain of A antibody is PCR amplified using specific primers (3′ primers contain short/long liner sequence for SL/LL constructs, respectively); meanwhile VL domain of B antibody is amplified using specific primers (5′ primers contains short/long liner sequence for SL/LL constructs, respectively). Both PCR reactions are performed according to standard PCR techniques and procedures. The two PCR products are gel-purified, and used together as overlapping template for the subsequent overlapping PCR reaction using standard PCR conditions. The overlapping PCR products are subcloned into Srf I and Not I double digested pBOS-hCk mammalian expression vector (Abbott) by using standard homologous recombination approach. Similar approach has been used to generate DVDBASL and DVDBALL as described below:

### Example 1.4.3

### Molecular Cloning of DNA Constructs for DVDBASL and DVDBALL

[0786] To generate heavy chain constructs DVDBAHC-LL and DVDBAHC-SL, VH domain of antibody B is PCR amplified using specific primers (3′ primers contain short/long liner sequence for SL/LL constructs, respectively); meanwhile VH domain of antibody A is amplified using specific primers (5′ primers contains short/long liner sequence for SL/LL constructs, respectively). Both PCR reactions are performed according to standard PCR techniques and procedures. The two PCR products are gel-purified, and used together as overlapping template for the subsequent overlapping PCR reaction using standard PCR conditions. The overlapping PCR products are subcloned into Srf I and Sal I double digested pBOS-hCγ1,z non-a mammalian expression vector (Abbott) by using standard homologous recombination approach.

[0787] To generate light chain constructs DVDBALC-LL and DVDBALC-SL, VL domain of antibody B is PCR amplified using specific primers (3′ primers contain short/long liner sequence for SL/LL constructs, respectively); meanwhile VL domain of antibody A is amplified using specific primers (5′ primers contains short/long liner sequence for SL/LL constructs, respectively). Both PCR reactions are performed according to standard PCR techniques and procedures. The two PCR products are gel-purified, and used together as overlapping template for the subsequent overlapping PCR reaction using standard PCR conditions. The overlapping PCR products are subcloned into Srf I and Not I double digested pBOS-hCk mammalian expression vector (Abbott) by using standard homologous recombination approach.

### Example 1.4.4

### Construction and Expression of Additional DVD-Ig

### Example 1.4.4.1

### Preparation of DVD-Ig Vector Constructs

[0788] Parent antibody amino acid sequences for specific antibodies, which recognize specific antigens or epitopes thereof, for incorporation into a DVD-Ig can be obtained by preparation of hybridomas as described above or can be obtained by sequencing known antibody proteins or nucleic acids. In addition, known sequences can be obtained from the literature. The sequences can be used to synthesize nucleic acids using standard DNA synthesis or amplification technologies and assembling the desired antibody fragments into expression vectors, using standard recombinant DNA technology, for expression in cells.

[0789] For example, nucleic acid codons were determined from amino acids sequences and oligonucleotide DNA was synthesized by Blue Heron Biotechnology, Inc. (www.blueheronbio.com) Bothell, Wash. USA. The oligonucleotides were assembled into 300-2,000 base pair double-stranded DNA fragments, cloned into a plasmid vector and sequence-verified. Cloned fragments were assembled using an enzymatic process to yield the complete gene and subcloned into an expression vector. (See U.S. Pat. Nos. 7,306,914; 7,297,541; 7,279,159; 7,150,969; 20080115243; 20080102475; 20080081379; 20080075690; 20080063780; 20080050506; 20080038777; 20080022422; 20070289033; 20070287170; 20070254338; 20070243194; 20070225227; 20070207171; 20070150976; 20070135620; 20070128190; 20070104722; 20070092484; 20070037196; 20070028321; 20060172404; 20060162026; 20060153791; 20030215458; 20030157643).

[0790] A group of pHybE vectors (U.S. Patent Application Ser. No. 61/021,282) were used for parental antibody and DVD-Ig cloning. V1, derived from pJP183; pHybE-hCg1,z,non-a V2, was used for cloning of antibody and DVD heavy chains with a wildtype constant region. V2, derived from pJP191; pHybE-hCk V2, was used for cloning of antibody and DVD light chains with a kappa constant region. V3, derived from pJP192; pHybE-hCl V2, was used for cloning of antibody and DVDs light chains with a lambda constant region. V4, built with a lambda signal peptide and a kappa constant region, was used for cloning of DVD light chains with a lambda-kappa hybrid V domain. V5, built with a kappa signal peptide and a lambda constant region, was used for cloning of DVD light chains with a kappa-lambda hybrid V domain. V7, derived from pJP183; pHybE-hCg1,z,non-a V2, was used for cloning of antibody and DVD heavy chains with a (234,235 AA) mutant constant region.

[0791] Referring to Table 51, a number of vectors were used in the cloning of the parent antibodies and DVD-Ig VH and VL chains.

TABLE 51
Vectors Used to Clone Parent Antibodies and DVD-Igs

| ID | Heavy chain vector | Light chain vector |
|---|---|---|
| AB001 | V1 | V2 |
| AB002 | V1 | V2 |
| AB003 | V1 | V2 |
| AB004 | V1 | V2 |
| AB005 | V1 | V2 |
| AB006 | V1 | V2 |
| AB007 | V1 | V3 |
| AB008 | V1 | V2 |
| AB009 | V1 | V2 |
| AB010 | V1 | V3 |
| AB011 | V1 | V2 |
| AB012 | V1 | V2 |
| AB013 | V1 | V2 |
| AB014 | V1 | V2 |
| AB015 | V1 | V2 |
| AB016 | V1 | V2 |
| AB033 | V1 | V2 |
| AB034 | V1 | V2 |
| AB035 | V1 | V2 |
| AB039 | V1 | V2 |
| AB047 | V1 | V2 |
| AB062 | V1 | V2 |
| AB063 | V1 | V2 |
| AB067 | V7 | V3 |
| AB069 | V1 | V2 |
| AB070 | V1 | V2 |
| AB071 | V7 | V2 |
| AB072 | V1 | V2 |
| AB073 | V1 | V3 |
| AB074 | V1 | V2 |
| AB075 | V1 | V3 |
| AB077 | V1 | V2 |
| AB079 | V1 | V2 |
| AB080 | V1 | V2 |
| DVD001 | V1 | V2 |
| DVD002 | V1 | V2 |
| DVD003 | V1 | V2 |
| DVD004 | V1 | V2 |
| DVD005 | V1 | V5 |
| DVD006 | V1 | V4 |
| DVD007 | V1 | V2 |
| DVD008 | V1 | V2 |
| DVD009 | V1 | V2 |
| DVD010 | V1 | V2 |
| DVD011 | V1 | V2 |
| DVD012 | V1 | V2 |
| DVD013 | V1 | V2 |
| DVD014 | V1 | V2 |
| DVD015 | V1 | V2 |
| DVD016 | V1 | V2 |
| DVD017 | V1 | V2 |
| DVD018 | V1 | V2 |
| DVD019 | V1 | V5 |
| DVD020 | V1 | V4 |
| DVD021 | V1 | V2 |
| DVD022 | V1 | V2 |
| DVD023 | V1 | V2 |
| DVD024 | V1 | V2 |
| DVD025 | V1 | V2 |
| DVD026 | V1 | V2 |
| DVD027 | V1 | V2 |
| DVD028 | V1 | V2 |
| DVD029 | V1 | V5 |
| DVD030 | V1 | V4 |
| DVD031 | V1 | V2 |
| DVD032 | V1 | V2 |
| DVD033 | V1 | V2 |
| DVD034 | V1 | V2 |
| DVD035 | V1 | V2 |
| DVD036 | V1 | V2 |
| DVD037 | V1 | V2 |
| DVD038 | V1 | V2 |
| DVD039 | V1 | V2 |
| DVD040 | V1 | V2 |
| DVD041 | V1 | V5 |
| DVD042 | V1 | V4 |
| DVD043 | V1 | V2 |
| DVD044 | V1 | V2 |
| DVD045 | V1 | V2 |
| DVD046 | V1 | V2 |
| DVD047 | V1 | V2 |
| DVD048 | V1 | V2 |
| DVD049 | V1 | V2 |
| DVD050 | V1 | V2 |
| DVD073 | V1 | V2 |
| DVD074 | V1 | V2 |
| DVD075 | V1 | V2 |
| DVD076 | V1 | V2 |
| DVD077 | V1 | V2 |
| DVD078 | V1 | V2 |
| DVD079 | V1 | V2 |
| DVD080 | V1 | V2 |
| DVD081 | V1 | V2 |
| DVD082 | V1 | V2 |
| DVD083 | V1 | V2 |
| DVD084 | V1 | V2 |
| DVD085 | V1 | V2 |
| DVD086 | V1 | V2 |
| DVD087 | V1 | V2 |
| DVD088 | V1 | V2 |
| DVD089 | V1 | V2 |
| DVD090 | V1 | V2 |
| DVD091 | V1 | V2 |
| DVD092 | V1 | V2 |
| DVD093 | V1 | V2 |
| DVD094 | V1 | V2 |
| DVD107 | V1 | V2 |
| DVD108 | V1 | V2 |
| DVD131 | V1 | V2 |
| DVD132 | V1 | V2 |
| DVD135 | V1 | V2 |
| DVD136 | V1 | V2 |
| DVD137 | V1 | V2 |
| DVD138 | V1 | V2 |
| DVD139 | V1 | V2 |
| DVD140 | V1 | V2 |
| DVD141 | V1 | V2 |
| DVD142 | V1 | V2 |
| DVD143 | V1 | V2 |
| DVD144 | V1 | V2 |
| DVD257 | V1 | V2 |
| DVD258 | V1 | V2 |
| DVD259 | V1 | V2 |
| DVD260 | V1 | V2 |
| DVD299 | V1 | V2 |
| DVD300 | V1 | V2 |
| DVD301 | V1 | V2 |
| DVD302 | V1 | V2 |
| DVD303 | V1 | V2 |
| DVD304 | V1 | V2 |
| DVD305 | V1 | V2 |
| DVD306 | V1 | V2 |
| DVD307 | V1 | V2 |
| DVD308 | V1 | V2 |
| DVD309 | V1 | V2 |
| DVD310 | V1 | V2 |
| DVD385 | V1 | V2 |
| DVD386 | V1 | V2 |
| DVD387 | V7 | V2 |
| DVD388 | V1 | V2 |
| DVD389 | V1 | V2 |
| DVD390 | V1 | V2 |
| DVD391 | V7 | V2 |
| DVD392 | V1 | V2 |
| DVD393 | V1 | V2 |
| DVD394 | V1 | V2 |
| DVD395 | V1 | V2 |
| DVD396 | V1 | V2 |
| DVD397 | V1 | V2 |
| DVD398 | V1 | V2 |
| DVD399 | V1 | V2 |
| DVD400 | V1 | V2 |
| DVD401 | V1 | V2 |
| DVD402 | V1 | V2 |
| DVD403 | V1 | V2 |
| DVD404 | V1 | V2 |
| DVD405 | V1 | V2 |
| DVD406 | V1 | V2 |
| DVD407 | V1 | V2 |
| DVD408 | V1 | V2 |
| DVD409 | V1 | V4 |
| DVD410 | V1 | V5 |
| DVD411 | V1 | V4 |
| DVD412 | V1 | V5 |
| DVD413 | V1 | V4 |
| DVD414 | V7 | V5 |
| DVD415 | V1 | V4 |
| DVD416 | V1 | V5 |
| DVD417 | V1 | V4 |
| DVD418 | V7 | V5 |
| DVD419 | V1 | V4 |
| DVD420 | V1 | V5 |
| DVD421 | V1 | V4 |
| DVD422 | V1 | V5 |
| DVD423 | V1 | V4 |
| DVD424 | V1 | V5 |
| DVD441 | V1 | V2 |
| DVD442 | V1 | V2 |
| DVD443 | V1 | V2 |
| DVD444 | V1 | V2 |
| DVD445 | V1 | V2 |
| DVD446 | V1 | V2 |
| DVD447 | V1 | V2 |
| DVD448 | V1 | V2 |
| DVD449 | V1 | V2 |
| DVD450 | V1 | V2 |
| DVD451 | V7 | V2 |
| DVD452 | V7 | V2 |
| DVD453 | V1 | V2 |
| DVD454 | V1 | V2 |
| DVD455 | V1 | V2 |
| DVD456 | V1 | V2 |
| DVD457 | V7 | V2 |
| DVD458 | V7 | V2 |
| DVD459 | V1 | V2 |
| DVD460 | V1 | V2 |
| DVD461 | V1 | V2 |
| DVD462 | V1 | V2 |
| DVD463 | V1 | V2 |
| DVD464 | V1 | V2 |
| DVD465 | V1 | V2 |
| DVD466 | V1 | V2 |
| DVD467 | V1 | V2 |
| DVD468 | V1 | V2 |
| DVD469 | V1 | V2 |
| DVD470 | V1 | V2 |
| DVD471 | V7 | V2 |
| DVD472 | V1 | V2 |
| DVD473 | V1 | V2 |
| DVD474 | V1 | V2 |
| DVD475 | V1 | V2 |
| DVD476 | V1 | V2 |
| DVD477 | V7 | V2 |
| DVD478 | V1 | V2 |
| DVD479 | V1 | V2 |
| DVD480 | V1 | V2 |
| DVD481 | V1 | V2 |
| DVD482 | V1 | V2 |
| DVD483 | V1 | V2 |
| DVD484 | V1 | V2 |
| DVD485 | V1 | V2 |
| DVD486 | V1 | V2 |
| DVD487 | V1 | V2 |
| DVD488 | V1 | V2 |
| DVD489 | V7 | V2 |
| DVD490 | V1 | V2 |
| DVD491 | V1 | V2 |
| DVD492 | V1 | V2 |
| DVD493 | V1 | V2 |
| DVD494 | V1 | V2 |
| DVD495 | V1 | V2 |
| DVD496 | V1 | V2 |
| DVD497 | V1 | V2 |
| DVD498 | V1 | V2 |
| DVD499 | V1 | V2 |
| DVD500 | V1 | V2 |
| DVD501 | V1 | V2 |
| DVD502 | V1 | V2 |
| DVD503 | V1 | V2 |
| DVD504 | V1 | V2 |
| DVD505 | V1 | V2 |
| DVD506 | V1 | V2 |
| DVD507 | V7 | V2 |
| DVD508 | V1 | V2 |
| DVD509 | V1 | V2 |
| DVD510 | V1 | V2 |
| DVD511 | V1 | V4 |
| DVD512 | V7 | V5 |
| DVD513 | V1 | V4 |
| DVD514 | V1 | V5 |
| DVD515 | V1 | V4 |
| DVD516 | V1 | V5 |
| DVD517 | V1 | V4 |
| DVD518 | V1 | V5 |
| DVD519 | V1 | V4 |
| DVD520 | V1 | V5 |
| DVD521 | V7 | V4 |
| DVD522 | V7 | V5 |
| DVD523 | V1 | V4 |
| DVD524 | V1 | V5 |
| DVD525 | V1 | V4 |
| DVD526 | V1 | V5 |
| DVD527 | V1 | V4 |
| DVD528 | V1 | V5 |
| DVD529 | V1 | V4 |
| DVD530 | V7 | V5 |
| DVD531 | V1 | V4 |
| DVD532 | V1 | V5 |
| DVD533 | V7 | V4 |
| DVD534 | V7 | V5 |
| DVD535 | V1 | V2 |
| DVD536 | V1 | V2 |
| DVD537 | V1 | V2 |
| DVD538 | V1 | V2 |
| DVD539 | V1 | V2 |
| DVD540 | V1 | V2 |
| DVD541 | V1 | V2 |
| DVD542 | V1 | V2 |
| DVD543 | V1 | V2 |
| DVD544 | V1 | V2 |
| DVD545 | V1 | V2 |
| DVD546 | V1 | V2 |
| DVD547 | V1 | V2 |
| DVD548 | V1 | V2 |
| DVD549 | V1 | V2 |
| DVD550 | V1 | V2 |
| DVD551 | V1 | V2 |
| DVD552 | V1 | V2 |
| DVD553 | V1 | V2 |
| DVD554 | V1 | V2 |
| DVD555 | V1 | V2 |
| DVD556 | V1 | V2 |
| DVD557 | V1 | V2 |
| DVD558 | V1 | V2 |
| DVD559 | V1 | V2 |
| DVD560 | V1 | V2 |
| DVD561 | V1 | V2 |
| DVD562 | V1 | V2 |
| DVD563 | V1 | V2 |
| DVD564 | V1 | V2 |
| DVD565 | V1 | V2 |
| DVD566 | V1 | V2 |
| DVD567 | V1 | V2 |
| DVD568 | V1 | V2 |
| DVD569 | V1 | V2 |
| DVD570 | V1 | V2 |
| DVD571 | V1 | V2 |
| DVD572 | V1 | V2 |
| DVD573 | V1 | V2 |
| DVD574 | V1 | V2 |
| DVD575 | V1 | V2 |
| DVD576 | V1 | V2 |
| DVD577 | V1 | V2 |
| DVD578 | V1 | V2 |
| DVD579 | V1 | V2 |
| DVD580 | V1 | V2 |
| DVD581 | V1 | V2 |
| DVD582 | V1 | V2 |
| DVD583 | V1 | V2 |
| DVD584 | V1 | V2 |
| DVD585 | V1 | V2 |
| DVD586 | V1 | V2 |
| DVD587 | V1 | V2 |
| DVD588 | V1 | V2 |
| DVD589 | V1 | V2 |
| DVD590 | V1 | V2 |
| DVD591 | V1 | V2 |
| DVD592 | V1 | V2 |
| DVD593 | V1 | V2 |
| DVD594 | V1 | V2 |
| DVD595 | V1 | V2 |
| DVD596 | V1 | V2 |
| DVD597 | V1 | V2 |
| DVD598 | V1 | V2 |
| DVD599 | V1 | V2 |
| DVD600 | V1 | V2 |
| DVD601 | V1 | V2 |
| DVD602 | V1 | V2 |
| DVD603 | V1 | V4 |
| DVD604 | V1 | V5 |
| DVD605 | V1 | V4 |
| DVD606 | V1 | V5 |
| DVD607 | V1 | V4 |
| DVD608 | V1 | V5 |
| DVD609 | V1 | V4 |
| DVD610 | V1 | V5 |
| DVD611 | V1 | V2 |
| DVD612 | V1 | V2 |
| DVD613 | V1 | V2 |
| DVD614 | V1 | V2 |
| DVD615 | V1 | V2 |
| DVD616 | V1 | V2 |
| DVD625 | V1 | V2 |
| DVD626 | V1 | V2 |
| DVD627 | V1 | V2 |
| DVD628 | V1 | V2 |
| DVD629 | V1 | V2 |
| DVD630 | V1 | V2 |
| DVD631 | V1 | V2 |
| DVD632 | V1 | V2 |
| DVD641 | V1 | V2 |
| DVD642 | V1 | V2 |
| DVD643 | V1 | V2 |
| DVD644 | V1 | V2 |
| DVD645 | V1 | V2 |
| DVD646 | V1 | V2 |
| DVD647 | V1 | V2 |
| DVD648 | V1 | V2 |
| DVD649 | V1 | V2 |
| DVD650 | V1 | V2 |
| DVD651 | V1 | V2 |
| DVD652 | V1 | V2 |
| DVD653 | V1 | V2 |
| DVD654 | V1 | V2 |
| DVD655 | V1 | V2 |
| DVD656 | V1 | V2 |
| DVD657 | V1 | V2 |
| DVD658 | V1 | V2 |
| DVD659 | V1 | V2 |
| DVD660 | V1 | V2 |
| DVD661 | V1 | V2 |
| DVD662 | V1 | V2 |
| DVD663 | V1 | V2 |
| DVD664 | V1 | V2 |
| DVD665 | V1 | V2 |
| DVD666 | V1 | V2 |
| DVD667 | V1 | V2 |
| DVD668 | V1 | V2 |
| DVD669 | V1 | V2 |
| DVD670 | V1 | V2 |
| DVD671 | V1 | V2 |
| DVD672 | V1 | V2 |
| DVD673 | V1 | V2 |
| DVD674 | V1 | V2 |
| DVD675 | V1 | V2 |
| DVD676 | V1 | V2 |
| DVD677 | V1 | V2 |
| DVD678 | V1 | V2 |
| DVD679 | V1 | V2 |
| DVD680 | V1 | V2 |
| DVD681 | V1 | V2 |
| DVD682 | V1 | V2 |
| DVD683 | V1 | V2 |
| DVD684 | V1 | V2 |
| DVD685 | V1 | V2 |
| DVD686 | V1 | V2 |
| DVD687 | V1 | V2 |
| DVD688 | V1 | V2 |
| DVD689 | V1 | V2 |
| DVD690 | V1 | V2 |
| DVD691 | V1 | V2 |
| DVD692 | V1 | V2 |
| DVD693 | V1 | V2 |
| DVD694 | V1 | V2 |
| DVD709 | V1 | V2 |
| DVD710 | V1 | V2 |
| DVD711 | V1 | V2 |
| DVD712 | V1 | V2 |

### Example 1.4.4.2

### Transfection and Expression in 293 Cells

[0792] The DVD-Ig vector constructs are transfected into 293 cells for production of DVD-Ig protein. The 293 transient transfection procedure used is a modification of the methods published in Durocher et al. (2002) Nucleic Acids Res. 30(2):E9 and Pham et al. (2005) Biotech. Bioengineering 90(3):332-44. Reagents that were used in the transfection included:
[0793] HEK 293-6E cells (human embryonic kidney cell line stably expressing EBNA1; obtained from National Research Council Canada) cultured in disposable Erlenmeyer flasks in a humidified incubator set at 130 rpm, 37° C. and 5% CO₂.
[0794] Culture medium: FreeStyle 293 Expression Medium (Invitrogen 12338-018) plus 25 μg/mL Geneticin (G418) (Invitrogen 10131-027) and 0.1% Pluronic F-68 (Invitrogen 24040-032).
[0795] Transfection medium: FreeStyle 293 Expression Medium plus 10 mM HEPES (Invitrogen 15630-080).
[0796] Polyethylenimine (PEI) stock: 1 mg/mL sterile stock solution, pH 7.0, prepared with linear 25 kDa PEI (Polysciences) and stored at less than −15° C.
[0797] Tryptone Feed Medium: 5% w/v sterile stock of Tryptone N1 (Organotechnie, 19554) in FreeStyle 293 Expression Medium.
   Cell preparation for transfection: Approximately 2-4 hours prior to transfection, HEK 293-6E cells are harvested by centrifugation and resuspended in culture medium at a cell density of approximately 1 million viable cells per mL. For each transfection, 40 mL of the cell suspension is transferred into a disposable 250-mL Erlenmeyer flask and incubated for 2-4 hours.
   Transfection: The transfection medium and PEI stock are prewarmed to room temperature (RT). For each transfection, 25 μg of plasmid DNA and 50 μg of polyethylenimine (PEI) are combined in 5 mL of transfection medium and incubated for 15±20 minutes at RT to allow the DNA:PEI complexes to form. For the BR3-Ig transfections, 25 μg of BR3-Ig plasmid is used per transfection. Each 5-mL DNA:PEI complex mixture is added to a 40-mL culture prepared previously and returned to the humidified incubator set at 130 rpm, 37° C. and 5% CO₂. After 20-28 hours, 5 mL of Tryptone Feed Medium is added to each transfection and the cultures are continued for six days.

[0798] Table 52 contains the yield data for parent antibodies or DVD-Ig constructs expressed as milligrams per liter in 293 cells.

TABLE 52
Transient Expression in Yields of Parent Antibodies and
DVD-Ig Constructs in 293 Cells

| | N-terminal | C-terminal | |
|---|---|---|---|
| | Variable | Variable | |
| Parent Antibody | Domain | Domain | |
| or DVD-Ig ID | (VD) | (VD) | Expression Yield (mg/L) |
| AB006 | CD-19 | | 9.4 |
| AB001 | CD-20 | | 90.2 |
| DVD001 | CD-20 | CD-19 | 5.8 |
| DVD002 | CD-19 | CD-20 | 2.4 |
| AB001 | CD-20 | | 90.2 |
| AB002 | CD-3 | | 67.2 |
| DVD003 | CD-20 | CD-3 | 4.2 |
| DVD004 | CD-3 | CD-20 | 7.4 |
| AB007 | CD-80 | | 9.6 |
| AB001 | CD-20 | | 90.2 |
| DVD005 | CD-20 | CD-80 | 35.4 |
| DVD006 | CD-80 | CD-20 | 43.4 |
| AB008 | CD-22 | | 50 |
| AB001 | CD-20 | | 90.2 |
| DVD007 | CD-20 | CD-22 | 0.8 |
| DVD008 | CD-22 | CD-20 | 0.22 |
| AB009 | CD-40 | | 36.6 |
| AB001 | CD-20 | | 90.2 |
| DVD009 | CD-20 | CD-40 | 2.6 |
| DVD010 | CD-40 | CD-20 | 8 |
| AB002 | CD-3 | | 67.2 |
| AB004 | HER-2 | | 108.2 |
| DVD011 | CD-3 | HER-2 | 30.6 |
| DVD012 | HER-2 | CD-3 | 74 |
| AB002 | CD-3 | | 67.2 |
| AB006 | CD-19 | | 9.4 |
| DVD013 | CD-3 | CD-19 | 12.4 |
| DVD014 | CD-19 | CD-3 | 7.2 |
| AB033 | EGFR | | 44.4 |
| AB004 | HER-2 | | 108.2 |
| DVD015 | EGFR | HER-2 | 42.2 |
| DVD016 | HER-2 | EGFR | 17 |
| AB002 | CD-3 | | 67.2 |
| AB033 | EGFR | | 44.4 |
| DVD017 | EGFR | CD-3 | 9.6 |
| DVD018 | CD-3 | EGFR | 4 |
| AB033 | EGFR | | 44.4 |
| AB011 | IGF1R | | 28.5 |
| DVD021 | EGFR | IGF1R | 10.4 |
| DVD022 | IGF1R | EGFR | 17.8 |
| AB005 | RON | | 67.4 |
| AB033 | EGFR | | 44.4 |
| DVD024 | RON | EGFR | 19.2 |
| DVD023 | EGFR | RON | 17.8 |
| AB033 | EGFR | | 44.4 |
| AB012 | HGF | | 22.8 |
| DVD025 | EGFR | HGF | 5.8 |
| DVD026 | HGF | EGFR | 2.2 |
| AB004 | HER-2 | | 108.2 |
| AB010 | IGF1,2 | | 38.6 |
| DVD029 | HER-2 | IGF1,2 | 74.4 |
| DVD030 | IGF1,2 | HER-2 | 26.8 |
| AB004 | HER-2 | | 108.2 |
| AB011 | IGF1R | | 28.5 |
| DVD031 | HER-2 | IGF1R | 95 |
| DVD032 | IGF1R | HER-2 | 41.4 |
| AB005 | RON | | 67.4 |
| AB012 | HGF | | 22.8 |
| DVD033 | RON | HGF | 29.4 |
| DVD034 | HGF | RON | 7.8 |
| AB014 | VEGF | | 52.4 |
| AB033 | EGFR | | 44.4 |
| DVD035 | VEGF | EGFR | 6.4 |
| DVD036 | EGFR | VEGF | 5.4 |
| AB014 | VEGF | | 52.4 |
| AB004 | HER-2 | | 108.2 |
| DVD037 | VEGF | HER-2 | 43.4 |
| DVD038 | HER-2 | VEGF | 41.2 |
| AB001 | CD-20 | | 57 |
| AB014 | VEGF | | 52.4 |
| DVD039 | VEGF | CD-20 | 0.22 |
| DVD040 | CD-20 | VEGF | 0.48 |
| AB014 | VEGF | | 52.4 |
| AB010 | IGF1,2 | | 38.6 |
| DVD041 | VEGF | IGF1,2 | 39.4 |
| DVD042 | IGF1,2 | VEGF | 8.8 |
| AB015 | DLL-4 | | 57.6 |
| AB014 | VEGF | | 52.4 |
| DVD044 | DLL4 | VEGF | 5.4 |
| DVD043 | VEGF | DLL4 | 17.4 |
| AB014 | VEGF | | 52.4 |
| AB012 | HGF | | 22.8 |
| DVD045 | VEGF | HGF | 4 |
| DVD046 | HGF | VEGF | 1.4 |
| AB005 | RON | | 67.4 |
| AB014 | VEGF | | 52.4 |
| DVD048 | RON | VEGF | 14 |
| DVD047 | VEGF | RON | 18 |
| AB014 | VEGF | | 52.4 |
| AB016 | NRP1 | | 114.6 |
| DVD049 | VEGF | NRP1 | 13 |
| DVD050 | NRP1 | VEGF | 27.2 |
| AB015 | DLL-4 | | 57.6 |
| AB047 | PlGF | | 23.6 |
| DVD257 | DLL4 | PlGF | 31.2 |
| DVD258 | PlGF | DLL4 | 21 |
| AB014 | VEGF | | 52.4 |
| AB047 | PlGF | | 23.6 |
| DVD259 | VEGF | PlGF | 2.2 |
| DVD260 | PlGF | VEGF | 7.8 |
| AB062 | ErbB3 | | 24.6 |
| AB033 | EGFR | | 44.4 |
| DVD299 | ErbB3 | EGFR | 4.2 |
| DVD300 | EGFR | ErbB3 | 1.6 |
| AB063 | ErbB3 | | 37.8 |
| AB033 | EGFR | | 44.4 |
| DVD305 | ErbB3 | EGFR | 5.6 |
| DVD306 | EGFR | ErbB3 | 11.2 |

[0799] All DVDs expressed well in 293 cells. DVDs could be easily purified over a protein A column. In most cases >5 mg/L purified DVD-Ig could be obtained easily from supernatants of 293 cells.

TABLE 53

Transient Expression in Yields of VEGF/DLL4 DVD-Ig
Constructs in 293 Cells

| | | | | | | |
|---|---|---|---|---|---|---|
| | | | | | | Expression |
| | | | HC | LC | Other DVD | Yield |
| DVD ID | Sequence ID | Position | Linker | Linker | Domain | (mg/L) |

| | | | | | | |
|---|---|---|---|---|---|---|
| DVD043 | VEGF (Seq. 1) | N-term. | Short | Short | DLL4 (seq. 1) | 17.4 |
| DVD044 | VEGF (Seq. 1) | C-term. | Short | Short | DLL4 (seq. 1) | 5.4 |
| DVD469 | VEGF (Seq. 1) | C-term. | Long | Long | DLL4 (seq. 1) | 1.6 |
| DVD470 | VEGF (Seq. 1) | N-term. | Long | Long | DLL4 (seq. 1) | 9.2 |
| DVD475 | VEGF (Seq. 1) | C-term. | Long | Short | DLL4 (seq. 1) | 6.2 |
| DVD476 | VEGF (Seq. 1) | N-term. | Long | Short | DLL4 (seq. 1) | 18.2 |
| DVD481 | VEGF (Seq. 1) | C-term. | Short | Long | DLL4 (seq. 1) | 0.9 |
| DVD482 | VEGF (Seq. 1) | N-term. | Short | Long | DLL4 (seq. 1) | 16.8 |
| DVD467 | VEGF (Seq. 2) | C-term. | Short | Short | DLL4 (seq. 1) | 2.4 |
| DVD468 | VEGF (Seq. 2) | N-term. | Short | Short | DLL4 (seq. 1) | 83.6 |
| DVD473 | VEGF (Seq. 2) | C-term. | Long | Long | DLL4 (seq. 1) | 1.8 |
| DVD474 | VEGF (Seq. 2) | N-term. | Long | Long | DLL4 (seq. 1) | 67.8 |
| DVD479 | VEGF (Seq. 2) | C-term. | Long | Short | DLL4 (seq. 1) | 0.8 |
| DVD480 | VEGF (Seq. 2) | N-term. | Long | Short | DLL4 (seq. 1) | 70.2 |
| DVD485 | VEGF (Seq. 2) | C-term. | Short | Long | DLL4 (seq. 1) | 2.6 |
| DVD486 | VEGF (Seq. 2) | N-term. | Short | Long | DLL4 (seq. 1) | 62.6 |
| DVD465 | VEGF (Seq. 3) | C-term. | Short | Short | DLL4 (seq. 1) | 22.4 |
| DVD466 | VEGF (Seq. 3) | N-term. | Short | Short | DLL4 (seq. 1) | 2.7 |
| DVD471 | VEGF (Seq. 3) | C-term. | Long | Long | DLL4 (seq. 1) | 10.6 |
| DVD472 | VEGF (Seq. 3) | N-term. | Long | Long | DLL4 (seq. 1) | 1.4 |
| DVD477 | VEGF (Seq. 3) | C-term. | Long | Short | DLL4 (seq. 1) | 18.2 |
| DVD478 | VEGF (Seq. 3) | N-term. | Long | Short | DLL4 (seq. 1) | 3.2 |
| DVD483 | VEGF (Seq. 3) | C-term. | Short | Long | DLL4 (seq. 1) | 13.6 |
| DVD484 | VEGF (Seq. 3) | N-term. | Short | Long | DLL4 (seq. 1) | 2.4 |
| DVD441 | VEGF (Seq. 1) | C-term. | Short | Short | DLL4 (seq. 2) | 9.2 |
| DVD442 | VEGF (Seq. 1) | N-term. | Short | Short | DLL4 (seq. 2) | 4.4 |
| DVD447 | VEGF (Seq. 1) | C-term. | Long | Long | DLL4 (seq. 2) | 9.2 |
| DVD448 | VEGF (Seq. 1) | N-term. | Long | Long | DLL4 (seq. 2) | 2.8 |
| DVD453 | VEGF (Seq. 1) | C-term. | Long | Short | DLL4 (seq. 2) | 5.0 |
| DVD454 | VEGF (Seq. 1) | N-term. | Long | Short | DLL4 (seq. 2) | 5.4 |
| DVD459 | VEGF (Seq. 1) | C-term. | Short | Long | DLL4 (seq. 2) | 12.0 |
| DVD460 | VEGF (Seq. 1) | N-term. | Short | Long | DLL4 (seq. 2) | 4.6 |
| DVD445 | VEGF (Seq. 2) | C-term. | Short | Short | DLL4 (seq. 2) | 40.0 |
| DVD446 | VEGF (Seq. 2) | N-term. | Short | Short | DLL4 (seq. 2) | 29.8 |
| DVD451 | VEGF (Seq. 2) | C-term. | Long | Long | DLL4 (seq. 2) | 35.0 |
| DVD452 | VEGF (Seq. 2) | N-term. | Long | Long | DLL4 (seq. 2) | 18.0 |
| DVD457 | VEGF (Seq. 2) | C-term. | Long | Short | DLL4 (seq. 2) | 46.8 |
| DVD458 | VEGF (Seq. 2) | N-term. | Long | Short | DLL4 (seq. 2) | 29.6 |
| DVD463 | VEGF (Seq. 2) | C-term. | Short | Long | DLL4 (seq. 2) | 37.6 |
| DVD464 | VEGF (Seq. 2) | N-term. | Short | Long | DLL4 (seq. 2) | 11.0 |
| DVD443 | VEGF (Seq. 3) | C-term. | Short | Short | DLL4 (seq. 2) | 40.4 |
| DVD444 | VEGF (Seq. 3) | N-term. | Short | Short | DLL4 (seq. 2) | 1.1 |
| DVD449 | VEGF (Seq. 3) | C-term. | Long | Long | DLL4 (seq. 2) | 31.6 |
| DVD450 | VEGF (Seq. 3) | N-term. | Long | Long | DLL4 (seq. 2) | 0.7 |
| DVD455 | VEGF (Seq. 3) | C-term. | Long | Short | DLL4 (seq. 2) | 62.6 |
| DVD456 | VEGF (Seq. 3) | N-term. | Long | Short | DLL4 (seq. 2) | 1.8 |
| DVD461 | VEGF (Seq. 3) | C-term. | Short | Long | DLL4 (seq. 2) | 42.0 |
| DVD462 | VEGF (Seq. 3) | N-term. | Short | Long | DLL4 (seq. 2) | 1.0 |
| DVD511 | VEGF (Seq. 1) | C-term. | Short | Short | DLL4 (seq. 3) | 7.8 |
| DVD512 | VEGF (Seq. 1) | N-term. | Short | Short | DLL4 (seq. 3) | 9.0 |
| DVD517 | VEGF (Seq. 1) | C-term. | Long | Long | DLL4 (seq. 3) | 8.2 |
| DVD518 | VEGF (Seq. 1) | N-term. | Long | Long | DLL4 (seq. 3) | 0.3 |
| DVD523 | VEGF (Seq. 1) | C-term. | Long | Short | DLL4 (seq. 3) | 9.4 |
| DVD524 | VEGF (Seq. 1) | N-term. | Long | Short | DLL4 (seq. 3) | 3.2 |
| DVD529 | VEGF (Seq. 1) | C-term. | Short | Long | DLL4 (seq. 3) | 12.4 |
| DVD530 | VEGF (Seq. 1) | N-term. | Short | Long | DLL4 (seq. 3) | 3.0 |
| DVD515 | VEGF (Seq. 2) | C-term. | Short | Short | DLL4 (seq. 3) | 24.0 |
| DVD516 | VEGF (Seq. 2) | N-term. | Short | Short | DLL4 (seq. 3) | 58.6 |
| DVD521 | VEGF (Seq. 2) | C-term. | Long | Long | DLL4 (seq. 3) | 43.4 |
| DVD522 | VEGF (Seq. 2) | N-term. | Long | Long | DLL4 (seq. 3) | 43.4 |
| DVD527 | VEGF (Seq. 2) | C-term. | Long | Short | DLL4 (seq. 3) | 33.0 |
| DVD528 | VEGF (Seq. 2) | N-term. | Long | Short | DLL4 (seq. 3) | 55.6 |
| DVD533 | VEGF (Seq. 2) | C-term. | Short | Long | DLL4 (seq. 3) | 40.8 |
| DVD534 | VEGF (Seq. 2) | N-term. | Short | Long | DLL4 (seq. 3) | 24.8 |
| DVD513 | VEGF (Seq. 3) | C-term. | Short | Short | DLL4 (seq. 3) | 29.6 |
| DVD514 | VEGF (Seq. 3) | N-term. | Short | Short | DLL4 (seq. 3) | 2.0 |
| DVD519 | VEGF (Seq. 3) | C-term. | Long | Long | DLL4 (seq. 3) | 9.0 |
| DVD520 | VEGF (Seq. 3) | N-term. | Long | Long | DLL4 (seq. 3) | 1.0 |
| DVD525 | VEGF (Seq. 3) | C-term. | Long | Short | DLL4 (seq. 3) | 26.8 |
| DVD526 | VEGF (Seq. 3) | N-term. | Long | Short | DLL4 (seq. 3) | 1.2 |
| DVD531 | VEGF (Seq. 3) | C-term. | Short | Long | DLL4 (seq. 3) | 20.2 |
| DVD532 | VEGF (Seq. 3) | N-term. | Short | Long | DLL4 (seq. 3) | 1.6 |
| DVD487 | VEGF (Seq. 1) | C-term. | Short | Short | DLL4 (seq. 4) | 2.1 |
| DVD488 | VEGF (Seq. 1) | N-term. | Short | Short | DLL4 (seq. 4) | 6.6 |
| DVD493 | VEGF (Seq. 1) | C-term. | Long | Long | DLL4 (seq. 4) | 10.4 |
| DVD494 | VEGF (Seq. 1) | N-term. | Long | Long | DLL4 (seq. 4) | 0.4 |
| DVD499 | VEGF (Seq. 1) | C-term. | Long | Short | DLL4 (seq. 4) | 12.2 |
| DVD500 | VEGF (Seq. 1) | N-term. | Long | Short | DLL4 (seq. 4) | 7.4 |
| DVD505 | VEGF (Seq. 1) | C-term. | Short | Long | DLL4 (seq. 4) | 6.2 |
| DVD506 | VEGF (Seq. 1) | N-term. | Short | Long | DLL4 (seq. 4) | 4.0 |
| DVD491 | VEGF (Seq. 2) | C-term. | Short | Short | DLL4 (seq. 4) | 18.2 |
| DVD492 | VEGF (Seq. 2) | N-term. | Short | Short | DLL4 (seq. 4) | 54.6 |
| DVD497 | VEGF (Seq. 2) | C-term. | Long | Long | DLL4 (seq. 4) | 8.6 |
| DVD498 | VEGF (Seq. 2) | N-term. | Long | Long | DLL4 (seq. 4) | 28.0 |
| DVD503 | VEGF (Seq. 2) | C-term. | Long | Short | DLL4 (seq. 4) | 20.0 |
| DVD504 | VEGF (Seq. 2) | N-term. | Long | Short | DLL4 (seq. 4) | 49.0 |
| DVD509 | VEGF (Seq. 2) | C-term. | Short | Long | DLL4 (seq. 4) | 14.2 |
| DVD510 | VEGF (Seq. 2) | N-term. | Short | Long | DLL4 (seq. 4) | 28.8 |
| DVD489 | VEGF (Seq. 3) | C-term. | Short | Short | DLL4 (seq. 4) | 14.8 |
| DVD490 | VEGF (Seq. 3) | N-term. | Short | Short | DLL4 (seq. 4) | 2.4 |
| DVD495 | VEGF (Seq. 3) | C-term. | Long | Long | DLL4 (seq. 4) | 4.8 |
| DVD496 | VEGF (Seq. 3) | N-term. | Long | Long | DLL4 (seq. 4) | 0.6 |
| DVD501 | VEGF (Seq. 3) | C-term. | Long | Short | DLL4 (seq. 4) | 20.2 |
| DVD502 | VEGF (Seq. 3) | N-term. | Long | Short | DLL4 (seq. 4) | 0.9 |
| DVD507 | VEGF (Seq. 3) | C-term. | Short | Long | DLL4 (seq. 4) | 5.8 |
| DVD508 | VEGF (Seq. 3) | N-term. | Short | Long | DLL4 (seq. 4) | 0.7 |

[0800] All DVDs expressed well in 293 cells. DVDs could be easily purified over a protein A column. In most cases >5 mg/L purified DVD-Ig could be obtained easily from supernatants of 293 cells.

### Example 1.4.5

### Characterization and Lead Selection of A/B DVD-Igs

[0801] The binding affinities of anti-A/B DVD-Igs are analyzed on Biacore against both protein A and protein B. The tetravalent property of the DVD-Ig is examined by multiple binding studies on Biacore. Meanwhile, the neutralization potency of the DVD-Igs for protein A and protein B are assessed by bioassays, respectively, as described herein. The DVD-Ig molecules that best retain the affinity and potency of the original parent mAbs are selected for in-depth physicochemical and bio-analytical (rat PK) characterizations as described herein for each mAb. Based on the collection of analyses, the final lead DVD-Ig is advanced into CHO stable cell line development, and the CHO-derived material is employed in stability, pharmacokinetic and efficacy studies in cynomolgus monkey, and preformulation activities.

### Example 2

### Generation and Characterization of Dual Variable Domain Immunoglobulins (DVD-Ig)

[0802] Dual variable domain immunoglobulins (DVD-Ig) using parent antibodies with known amino acid sequences were generated by synthesizing polynucleotide fragments encoding DVD-Ig variable heavy and DVD-Ig variable light chain sequences and cloning the fragments into a pHybC-D2 vector according to Example 1.4.4.1. The DVD-Ig constructs were cloned into and expressed in 293 cells as described in Example 1.4.4.2. The DVD-Ig protein was purified according to standard methods. Functional characteristics were determined according to the methods described in Example 1.1.1 and 1.1.2 as indicated. DVD-Ig VH and VL chains for the DVD-Igs of the invention are provided below.

### Example 2.1

### Generation of CD-20 and CD-19 DVD-Igs

TABLE 54

| | DVD | Outer | Inner | |
|---|---|---|---|---|
| SEQ | Variable | Variable | Variable | |
| ID | Domain | Domain | Domain | Sequence |
| NO | Name | Name | Name | 12345678901234567890123456789012345 |
| 112 | DVD001H | AB001VH | AB006VH | QVQLQQPGAELVKPGASVKMSCKASGYTFTSYNMH |
| | | | | WVKQTPGRGLEWIGAIYPGNGDTSYNQKFKGKATL |
| | | | | TADKSSSTAYMQLSSLTSEDSAVYYCARSTYYGGD |
| | | | | WYENVWGAGTTVTVSAASTKGPQVQLQQSGAELVR |
| | | | | PGSSVKISCKASGYAFSSYWMNWVKQRPGQGLEWI |
| | | | | GQIWPGDGDTNYNGKFKGKATLTADESSSTAYMQL |
| | | | | SSLASEDSAVYFCARRETTTVGRYYYAMDYWGQGT |
| | | | | SVTVSS |
| 113 | DVD001L | AB001VL | AB006VL | QIVLSQSPAILSPSPGEKVTMTCRASSSVSYIHWF |
| | | | | QQKPGSSPKPWIYATSNLASGVPVRFSGSGSGTSY |
| | | | | SLTISRVEAEDAATYYCQQWTSNPPTFGGGTKLEI |
| | | | | KRTVAAPDILLTQTPASLAVSLGQRATISCKASQS |
| | | | | VDYDGDSYLNWYQQIPGQPPKLLIYDASNLVSGIP |
| | | | | PRFSGSGSGTDFTLNIHPVEKVDAATYHCQQSTED |
| | | | | PWTFGGGTKLEIKR |
| 114 | DVD002H | AB006VH | AB001VH | QVQLQQSGAELVRPGSSVKISCKASGYAFSSYWMN |
| | | | | WVKQRPGQGLEWIGQIWPGDGDTNYNGKFKGKATL |
| | | | | TADESSSTAYMQLSSLASEDSAVYFCARRETTTVG |
| | | | | RYYYAMDYWGQGTSVTVSSASTKGPQVQLQQPGAE |
| | | | | LVKPGASVKMSCKASGYTFTSYNMHWVKQTPGRGL |
| | | | | EWIGAIYPGNGDTSYNQKFKGKATLTADKSSSTAY |
| | | | | MQLSSLTSEDSAVYYCARSTYYGGDWYFNVWGAGT |
| | | | | TVTVSA |
| 115 | DVD002L | AB006VL | AB001VL | DILLTQTPASLAVSLGQRATISCKASQSVDYDGDS |
| | | | | YLNWYQQIPGQPPKLLIYDASNLVSGIPPRFSGSG |
| | | | | SGTDFTLNIHPVEKVDAATYHCQQSTEDPWTFGGG |
| | | | | TKLEIKRTVAAPQIVLSQSPAILSPSPGEKVTMTC |
| | | | | RASSSVSYIHWFQQKPGSSPKPWIYATSNLASGVP |
| | | | | VRFSGSGSGTSYSLTISRVEAEDAATYYCQQWTSN |
| | | | | PPTFGGGTKLEIKR |

### Example 2.2

### Generation of CD-20 and CD-3 (Seq. 1) DVD-Igs

TABLE 55

| | DVD | Outer | Inner | |
|---|---|---|---|---|
| SEQ | Variable | Variable | Variable | |
| ID | Domain | Domain | Domain | Sequence |
| NO | Name | Name | Name | 12345678901234567890123456789012345 |
| 116 | DVD003H | AB001VH | AB002VH | QVQLQQPGAELVKPGASVKMSCKASGYTFTSYNMH |
| | | | | WVKQTPGRGLEWIGAIYPGNGDTSYNQKFKGKATL |
| | | | | TADKSSSTAYMQLSSLTSEDSAVYYCARSTYYGGD |
| | | | | WYFNVWGAGTTVTVSAASTKGPQVQLQQSGAELAR |
| | | | | PGASVKMSCKASGYTFTRYTMHWVKQRPGQGLEWI |
| | | | | GYINPSRGYTNYNQKFKDKATLTTDKSSSTAYMQL |
| | | | | SSLTSEDSAVYYCARYYDDHYCLDYWGQGTTLTVS |
| | | | | S |
| 117 | DVD003L | AB001VL | AB002VL | QIVLSQSPAILSPSPGEKVTMTCRASSSVSYIHWF |
| | | | | QQKPGSSPKPWIYATSNLASGVPVRFSGSGSGTSY |
| | | | | SLTISRVEAEDAATYYCQQWTSNPPTFGGGTKLEI |
| | | | | KRTVAAPQIVLTQSPAIMSASPGEKVTMTCRASSS |
| | | | | VSYMNWYQQKSGTSPKRWIYDTSKVASGVPYRFSG |
| | | | | SGSGTSYSLTISSMEAEDAATYYCQQWSSNPLTFG |
| | | | | SGTKLEINR |
| 118 | DVD004H | AB002VH | AB001VH | QVQLQQSGAELARPGASVKMSCKASGYTFTRYTMH |
| | | | | WVKQRPGQGLEWIGYINPSRGYTNYNQKFKDKATL |
| | | | | TTDKSSSTAYMQLSSLTSEDSAVYYCARYYDDHYC |
| | | | | LDYWGQGTTLTVSSASTKGPQVQLQQPGAELVKPG |
| | | | | ASVKMSCKASGYTFTSYNMHWVKQTPGRGLEWIGA |
| | | | | IYPGNGDTSYNQKFKGKATLTADKSSSTAYMQLSS |
| | | | | LTSEDSAVYYCARSTYYGGDWYFNVWGAGTTVTVS |
| | | | | A |
| 119 | DVD004L | AB002VL | AB001VL | QIVLTQSPAIMSASPGEKVTMTCRASSSVSYMNWY |
| | | | | QQKSGTSPKRWIYDTSKVASGVPYRFSGSGSGTSY |
| | | | | SLTISSMEAEDAATYYCQQWSSNPLTFGSGTKLEI |
| | | | | NRTVAAPQIVLSQSPAILSPSPGEKVTMTCRASSS |
| | | | | VSYIHWFQQKPGSSPKPWIYATSNLASGVPVRFSG |
| | | | | SGSGTSYSLTISRVEAEDAATYYCQQWTSNPPTFG |
| | | | | GGTKLEIKR |

### Example 2.3

### Generation of CD-20 and CD-80 DVD-Igs

TABLE 56

| | DVD | Outer | Inner | |
|---|---|---|---|---|
| SEQ | Variable | Variable | Variable | |
| ID | Domain | Domain | Domain | Sequence |
| NO | Name | Name | Name | 12345678901234567890123456789012345 |
| 120 | DVD005H | AB001VH | AB007VH | QVQLQQPGAELVKPGASVKMSCKASGYTFTSYNMH |
| | | | | WVKQTPGRGLEWIGAIYPGNGDTSYNQKFKGKATL |
| | | | | TADKSSSTAYMQLSSLTSEDSAVYYCARSTYYGGD |
| | | | | WYFNVWGAGTTVTVSAASTKGPQVQLQESGPGLVK |
| | | | | PSETLSLTCAVSGGSISGGYGWGWIRQPPGKGLEW |
| | | | | IGSFYSSSGNTYYNPSLKSQVTISTDTSKNQFSLK |
| | | | | LNSMTAADTAVYYCVRDRLFSVVGMVYNNWFDVWG |
| | | | | PGVLVTVSS |
| 121 | DVD005L | AB001VL | AB007VL | QIVLSQSPAILSPSPGEKVTMTCRASSSVSYIHWF |
| | | | | QQKPGSSPKPWIYATSNLASGVPVRFSGSGSGTSY |
| | | | | SLTISRVEAEDAATYYCQQWTSNPPTFGGGTKLEI |
| | | | | KRTVAAPESALTQPPSVSGAPGQKVTISCTGSTSN |
| | | | | IGGYDLHWYQQLPGTAPKLLIYDINKRPSGISDRF |
| | | | | SGSKSGTAASLAITGLQTEDEADYYCQSYDSSLNA |
| | | | | QVFGGGTRLTVLG |
| 122 | DVD006H | AB007VH | AB001VH | QVQLQESGPGLVKPSETLSLTCAVSGGSISGGYGW |
| | | | | GWIRQPPGKGLEWIGSFYSSSGNTYYNPSLKSQVT |
| | | | | ISTDTSKNQFSLKLNSMTAADTAVYYCVRDRLFSV |
| | | | | VGMVYNNWFDVWGPGVLVTVSSASTKGPQVQLQQP |
| | | | | GAELVKPGASVKMSCKASGYTFTSYNMHWVKQTPG |
| | | | | RGLEWIGAIYPGNGDTSYNQKFKGKATLTADKSSS |
| | | | | TAYMQLSSLTSEDSAVYYCARSTYYGGDWYFNVWG |
| | | | | AGTTVTVSA |
| 123 | DVD006L | AB007VL | AB001VL | ESALTQPPSVSGAPGQKVTISCTGSTSNIGGYDLH |
| | | | | WYQQLPGTAPKLLIYDINKRPSGISDRFSGSKSGT |
| | | | | AASLAITGLQTEDEADYYCQSYDSSLNAQVFGGGT |
| | | | | RLTVLGQPKAAPQIVLSQSPAILSPSPGEKVTMTC |
| | | | | RASSSVSYIHWFQQKPGSSPKPWIYATSNLASGVP |
| | | | | VRFSGSGSGTSYSLTISRVEAEDAATYYCQQWTSN |
| | | | | PPTFGGGTKLEIKR |

### Example 2.4

### Generation of CD-20 and CD-22 DVD-Igs

TABLE 57

| | DVD | Outer | Inner | |
|---|---|---|---|---|
| SEQ | Variable | Variable | Variable | |
| ID | Domain | Domain | Domain | Sequence |
| NO | Name | Name | Name | 12345678901234567890123456789012345 |
| 124 | DVD007H | AB001VH | AB008VH | QVQLQQPGAELVKPGASVKMSCKASGYTFTSYNMH |
| | | | | WVKQTPGRGLEWIGAIYPGNGDTSYNQKFKGKATL |
| | | | | TADKSSSTAYMQLSSLTSEDSAVYYCARSTYYGGD |
| | | | | WYFNVWGAGTTVTVSAASTKGPQVQLVQSGAEVKK |
| | | | | PGSSVKVSCKASGYTFTSYWLHWVRQAPGQGLEWI |
| | | | | GYINPRNDYTEYNQNFKDKATITADESTNTAYMEL |
| | | | | SSLRSEDTAFYFCARRDITTFYWGQGTTVTVSS |
| 125 | DVD007L | AB001VL | AB008VL | QIVLSQSPAILSPSPGEKVTMTCRASSSVSYIHWF |
| | | | | QQKPGSSPKPWIYATSNLASGVPVRFSGSGSGTSY |
| | | | | SLTISRVEAEDAATYYCQQWTSNPPTFGGGTKLEI |
| | | | | KRTVAAPDIQLTQSPSSLSASVGDRVTMSCKSSQS |
| | | | | VLYSANHKNYLAWYQQKPGKAPKLLIYWASTRESG |
| | | | | VPSRFSGSGSGTDFTFTISSLQPEDIATYYCHQYL |
| | | | | SSWTFGGGTKLEIKR |
| 126 | DVD008H | AB008VH | AB001VH | QVQLVQSGAEVKKPGSSVKVSCKASGYTFTSYWLH |
| | | | | WVRQAPGQGLEWIGYINPRNDYTEYNQNFKDKATI |
| | | | | TADESTNTAYMELSSLRSEDTAFYFCARRDITTFY |
| | | | | WGQGTTVTVSSASTKGPQVQLQQPGAELVKPGASV |
| | | | | KMSCKASGYTFTSYNMHWVKQTPGRGLEWIGAIYP |
| | | | | GNGDTSYNQKFKGKATLTADKSSSTAYMQLSSLTS |
| | | | | EDSAVYYCARSTYYGGDWYFNVWGAGTTVTVSA |
| 127 | DVD008L | AB008VL | AB001VL | DIQLTQSPSSLSASVGDRVTMSCKSSQSVLYSANH |
| | | | | KNYLAWYQQKPGKAPKLLIYWASTRESGVPSRFSG |
| | | | | SGSGTDFTFTISSLQPEDIATYYCHQYLSSWTFGG |
| | | | | GTKLEIKRTVAAPQIVLSQSPAILSPSPGEKVTMT |
| | | | | CRASSSVSYIHWFQQKPGSSPKPWIYATSNLASGV |
| | | | | PVRFSGSGSGTSYSLTISRVEAEDAATYYCQQWTS |
| | | | | NPPTFGGGTKLEIKR |

### Example 2.5

### Generation of CD-20 and CD-40 DVD-Igs

TABLE 58

| | DVD | Outer | Inner | |
|---|---|---|---|---|
| SEQ | Variable | Variable | Variable | |
| ID | Domain | Domain | Domain | Sequence |
| No. | Name | Name | Name | 12345678901234567890123456789012345 |
| 128 | DVD009H | AB001VH | AB009VH | QVQLQQPGAELVKPGASVKMSCKASGYTFTSYNMH |
| | | | | WVKQTPGRGLEWIGAIYPGNGDTSYNQKFKGKATL |
| | | | | TADKSSSTAYMQLSSLTSEDSAVYYCARSTYYGGD |
| | | | | WYFNVWGAGTTVTVSAASTKGPQVQLVESGGGVVQ |
| | | | | PGRSLRLSCAASGFTFSSYGMHWVRQAPGKGLEWV |
| | | | | AVISYEESNRYHADSVKGRFTISRDNSKITLYLQM |
| | | | | NSLRTEDTAVYYCARDGGIAAPGPDYWGQGTLVTV |
| | | | | SS |
| 129 | DVD009L | AB001VL | AB009VL | QIVLSQSPAILSPSPGEKVTMTCRASSSVSYIHWF |
| | | | | QQKPGSSPKPWIYATSNLASGVPVRFSGSGSGTSY |
| | | | | SLTISRVEAEDAATYYCQQWTSNPPTFGGGTKLEI |
| | | | | KRTVAAPDIVMTQSPLSLTVTPGEPASISCRSSQS |
| | | | | LLYSNGYNYLDWYLQKPGQSPQVLISLGSNRASGV |
| | | | | PDRFSGSGSGTDFTLKISRVEAEDVGVYYCMQARQ |
| | | | | TPFTFGPGTKVDIRR |
| 130 | DVD010H | AB009VH | AB001VH | QVQLVESGGGVVQPGRSLRLSCAASGFTFSSYGMH |
| | | | | WVRQAPGKGLEWVAVISYEESNRYHADSVKGRFTI |
| | | | | SRDNSKITLYLQMNSLRTEDTAVYYCARDGGIAAP |
| | | | | GPDYWGQGTLVTVSSASTKGPQVQLQQPGAELVKP |
| | | | | GASVKMSCKASGYTFTSYNMHWVKQTPGRGLEWIG |
| | | | | AIYPGNGDTSYNQKFKGKATLTADKSSSTAYMQLS |
| | | | | SLTSEDSAVYYCARSTYYGGDWYFNVWGAGTTVTV |
| | | | | SA |
| 131 | DVD010L | AB009VL | AB001VL | DIVMTQSPLSLTVTPGEPASISCRSSQSLLYSNGY |
| | | | | NYLDWYLQKPGQSPQVLISLGSNRASGVPDRFSGS |
| | | | | GSGTDFTLKISRVEAEDVGVYYCMQARQTPFTFGP |
| | | | | GTKVDIRRTVAAPQIVLSQSPAILSPSPGEKVTMT |
| | | | | CRASSSVSYIHWFQQKPGSSPKPWIYATSNLASGV |
| | | | | PVRFSGSGSGTSYSLTISRVEAEDAATYYCQQWTS |
| | | | | NPPTFGGGTKLEIKR |

### Example 2.6

### Generation of CD-3 (Seq. 1) and HER-2 (Seq. 1) DVD-Igs

TABLE 59

| | DVD | Outer | Inner | |
|---|---|---|---|---|
| SEQ | Variable | Variable | Variable | |
| ID | Domain | Domain | Domain | Sequence |
| NO | Name | Name | Name | 12345678901234567890123456789012345 |
| 132 | DVD011H | AB002VH | AB004VH | QVQLQQSGAELARPGASVKMSCKASGYTFTRYTMH |
| | | | | WVKQRPGQGLEWIGYINPSRGYTNYNQKFKDKATL |
| | | | | TTDKSSSTAYMQLSSLTSEDSAVYYCARYYDDHYC |
| | | | | LDYWGQGTTLTVSSASTKGPEVQLVESGGGLVQPG |
| | | | | GSLRLSCAASGFNIKDTYIHWVRQAPGKGLEWVAR |
| | | | | IYPTNGYTRYADSVKGRFTISADTSKNTAYLQMNS |
| | | | | LRAEDTAVYYCSRWGGDGFYAMDYWGQGTLVTVSS |
| 133 | DVD011L | AB002VL | AB004VL | QIVLTQSPAIMSASPGEKVTMTCRASSSVSYMNWY |
| | | | | QQKSGTSPKRWIYDTSKVASGVPYRFSGSGSGTSY |
| | | | | SLTISSMEAEDAATYYCQQWSSNPLTFGSGTKLEI |
| | | | | NRTVAAPDIQMTQSPSSLSASVGDRVTITCRASQD |
| | | | | VNTAVAWYQQKPGKAPKLLIYSASFLYSGVPSRFS |
| | | | | GSRSGTDFTLTISSLQPEDFATYYCQQHYTTPPTF |
| | | | | GQGTKVEIKR |
| 134 | DVD012H | AB004VH | AB002VH | EVQLVESGGGLVQPGGSLRLSCAASGFNIKDTYIH |
| | | | | WVRQAPGKGLEWVARIYPTNGYTRYADSVKGRFTI |
| | | | | SADTSKNTAYLQMNSLRAEDTAVYYCSRWGGDGFY |
| | | | | AMDYWGQGTLVTVSSASTKGPQVQLQQSGAELARP |
| | | | | GASVKMSCKASGYTFTRYTMHWVKQRPGQGLEWIG |
| | | | | YINPSRGYTNYNQKFKDKATLTTDKSSSTAYMQLS |
| | | | | SLTSEDSAVYYCARYYDDHYCLDYWGQGTTLTVSS |
| 135 | DVD012L | AB004VL | AB002VL | DIQMTQSPSSLSASVGDRVTITCRASQDVNTAVAW |
| | | | | YQQKPGKAPKLLIYSASFLYSGVPSRFSGSRSGTD |
| | | | | FTLTISSLQPEDFATYYCQQHYTTPPTFGQGTKVE |
| | | | | IKRTVAAPQIVLIQSPAIMSASPGEKVTMTCRASS |
| | | | | SVSYMNWYQQKSGTSPKRWIYDTSKVASGVPYRFS |
| | | | | GSGSGTSYSLTISSMEAEDAATYYCQQWSSNPLTF |
| | | | | GSGTTKLEINR |

### Example 2.7

### Generation of CD-3 (Seq. 1) and CD-19 DVD-Igs

TABLE 60

| | DVD | Outer | Inner | |
|---|---|---|---|---|
| SEQ | Variable | Variable | Variable | |
| ID | Domain | Domain | Domain | Sequence |
| NO | Name | Name | Name | 12345678901234567890123456789012345 |
| 136 | DVD013H | AB002VH | AB006VH | QVQLQQSGAELARPGASVKMSCKASGYTFTRYTMH |
| | | | | WVKQRPGQGLEWIGYINPSRGYTNYNQKFKDKATL |
| | | | | TTDKSSSTAYMQLSSLTSEDSAVYYCARYYDDHYC |
| | | | | LDYWGQGTTLTVSSASTKGPQVQLQQSGAELVRPG |
| | | | | SSVKISCKASGYAFSSYWMNWVKQRPGQGLEWIGQ |
| | | | | IWPGDGDTNYNGKFKGKATLTADESSSTAYMQLSS |
| | | | | LASEDSAVYFCARRETTTVGRYYYAMDYWGQGTSV |
| | | | | TVSS |
| 137 | DVD013L | AB002VL | AB006VL | QIVLTQSPAIMSASPGEKVTMTCRASSSVSYMNWY |
| | | | | QQKSGTSPKRWIYDTSKVASGVPYRFSGSGSGTSY |
| | | | | SLTISSMEAEDAATYYCQQWSSNPLTFGSGTKLEI |
| | | | | NRTVAAPDILLTQTPASLAVSLGQRATISCKASQS |
| | | | | VDYDGDSYLNWYQQIPGQPPKLLIYDASNLVSGIP |
| | | | | PRFSGSGSGTDFTLNIHPVEKVDAATYHCQQSTED |
| | | | | PWTFGGGTKLEIKR |
| 138 | DVD014H | AB006VH | AB002VH | QVQLQQSGAELVRPGSSVKISCKASGYAFSSYWMN |
| | | | | WVKQRPGQGLEWIGQIWPGDGDTNYNGKFKGKATL |
| | | | | TADESSSTAYMQLSSLASEDSAVYFCARRETTTVG |
| | | | | RYYYAMDYWGQGTSVTVSSASTKGPQVQLQQSGAE |
| | | | | LARPGASVKMSCKASGYTFTRYTMHWVKQRPGQGL |
| | | | | EWIGYINPSRGYTNYNQKFKDKATLTTDKSSSTAY |
| | | | | MQLSSLTSEDSAVYYCARYYDDHYCLDYWGQGTTL |
| | | | | TVSS |
| 139 | DVD014L | AB006VL | AB002VL | DILLTQTPASLAVSLGQRATISCKASQSVDYDGDS |
| | | | | YLNWYQQIPGQPPKLLIYDASNLVSGIPPRFSGSG |
| | | | | SGTDFTLNIHPVEKVDAATYHCQQSTEDPWTFGGG |
| | | | | TKLEIKRTVAAPQIVLTQSPAIMSASPGEKVTMTC |
| | | | | RASSSVSYMNWYQQKSGTSPKRWIYDTSKVASGVP |
| | | | | YRFSGSGSGTSYSLTISSMEAEDAATYYCQQWSSN |
| | | | | PLTFGSGTKLEINR |

### Example 2.8

### Generation of EGFR (Seq. 2) and HER-2 (Seq. 1) DVD-Igs

TABLE 61

| | DVD | Outer | Inner | |
|---|---|---|---|---|
| SEQ | Variable | Variable | Variable | |
| ID | Domain | Domain | Domain | Sequence |
| NO | Name | Name | Name | 12345678901234567890123456789012345 |
| 140 | DVD015H | AB033VH | AB004VH | QVQLKQSGPGLVQPSQSLSITCTVSGFSLTNYGVH |
| | | | | WVRQSPGKGLEWLGVIWSGGNTDYNTPFTSRLSIN |
| | | | | KDNSKSQVFFKMNSLQSNDTAIYYCARALTYYDYE |
| | | | | FAYWGQGTLVTVSAASTKGPEVQLVESGGGLVQPG |
| | | | | GSLRLSCAASGFNIKDTYIHWVRQAPGKGLEWVAR |
| | | | | IYPTNGYTRYADSVKGRFTISADTSKNTAYLQMNS |
| | | | | LRAEDTAVYYCSRWGGDGFYAMDYWGQGTLVTVSS |
| 141 | DVD015L | AB033VL | AB004VL | DILLTQSPVILSVSPGERVSFSCRASQSIGTNIHW |
| | | | | YQQRTNGSPRLLIKYASESISGIPSRFSGSGSGTD |
| | | | | FTLSINSVESEDIADYYCQQNNNWPTTFGAGTKLE |
| | | | | LKRTVAAPDIQMTQSPSSLSASVGDRVTITCRASQ |
| | | | | DVNTAVAWYQQKPGKAPKLLIYSASFLYSGVPSRF |
| | | | | SGSRSGTDFTLTISSLQPEDFATYYCQQHYTTPPT |
| | | | | FGQGTKVEIKR |
| 142 | DVD016H | AB004VH | AB033VH | EVQLVESGGGLVQPGGSLRLSCAASGFNIKDTYIH |
| | | | | WVRQAPGKGLEWVARIYPTNGYTRYADSVKGRFTI |
| | | | | SADTSKNTAYLQMNSLRAEDTAVYYCSRWGGDGFY |
| | | | | AMDYWGQGTLVTVSSASTKGPQVQLKQSGPGLVQP |
| | | | | SQSLSITCTVSGFSLTNYGVHWVRQSPGKGLEWLG |
| | | | | VIWSGGNTDYNTPFTSRLSINKDNSKSQVFFKMNS |
| | | | | LQSNDTAIYYCARALTYYDYEFAYWGQGTLVTVSA |
| 143 | DVD016L | AB004VL | AB033VL | DIQMTQSPSSLSASVGDRVTITCRASQDVNTAVAW |
| | | | | YQQKPGKAPKLLIYSASFLYSGVPSRFSGSRSGTD |
| | | | | FTLTISSLQPEDFATYYCQQHYTTPPTFGQGTKVE |
| | | | | IKRTVAAPDILLTQSPVILSVSPGERVSFSCRASQ |
| | | | | SIGTNIHWYQQRTNGSPRLLIKYASESISGIPSRF |
| | | | | SGSGSGTDFTLSINSVESEDIADYYCQQNNNWPTT |
| | | | | FGAGTKLELKR |

### Example 2.9

### Generation of EGFR (Seq. 2) and CD-3 (Seq. 1) DVD-Igs

TABLE 62

| | DVD | Outer | Inner | |
|---|---|---|---|---|
| SEQ | Variable | Variable | Variable | |
| ID | Domain | Domain | Domain | Sequence |
| NO | Name | Name | Name | 12345678901234567890123456789012345 |
| 144 | DVD017H | AB033VH | AB002VH | QVQLKQSGPGLVQPSQSLSITCTVSGFSLTNYGVH |
| | | | | WVRQSPGKGLEWLGVIWSGGNTDYNTPFTSRLSIN |
| | | | | KDNSKSQVFFKMNSLQSNDTAIYYCARALTYYDYE |
| | | | | FAYWGQGTLVTVSAASTKGPQVQLQQSGAELARPG |
| | | | | ASVKMSCKASGYTFTRYTMHWVKQRPGQGLEWIGY |
| | | | | INPSRGYTNYNQKFKDKATLTTDKSSSTAYMQLSS |
| | | | | LTSEDSAVYYCARYYDDHYCLDYWGQGTTLTVSS |
| 145 | DVD017L | VD033VL | AB002VL | DILLTQSPVILSVSPGERVSFSCRASQSIGTNIHW |
| | | | | YQQRTNGSPRLLIKYASESISGIPSRFSGSGSGTD |
| | | | | FTLSINSVESEDIADYYCQQNNNWPTTFGAGTKLE |
| | | | | LKRTVAAPQIVLTQSPAIMSASPGEKVTMTCRASS |
| | | | | SVSYMNWYQQKSGTSPKRWIYDTSKVASGVPYRFS |
| | | | | GSGSGTSYSLTISSMEAEDAATYYCQQWSSNPLTF |
| | | | | GSGTKLEINR |
| 146 | DVD018H | AB002VH | AB033VH | QVQLQQSGAELARPGASVKMSCKASGYTFTRYTMH |
| | | | | WVKQRPGQGLEWIGYINPSRGYTNYNQKFKDKATL |
| | | | | TTDKSSSTAYMQLSSLTSEDSAVYYCARYYDDHYC |
| | | | | LDYWGQGTTLTVSSASTKGPQVQLKQSGPGLVQPS |
| | | | | QSLSITCTVSGFSLTNYGVHWVRQSPGKGLEWLGV |
| | | | | IWSGGNTDYNTPFTSRLSINKDNSKSQVFFKMNSL |
| | | | | QSNDTAIYYCARALTYYDYEFAYWGQGTLVTVSA |
| 147 | DVD018L | AB002VL | AB033VL | QIVLTQSPAIMSASPGEKVTMTCRASSSVSYMNWY |
| | | | | QQKSGTSPKRWIYDTSKVASGVPYRFSGSGSGTSY |
| | | | | SLTISSMEAEDAATYYCQQWSSNPLTFGSGTKLEI |
| | | | | NRTVAAPDILLTQSPVILSVSPGERVSFSCRASQS |
| | | | | IGTNIHWYQQRTNGSPRLLIKYASESISGIPSRFS |
| | | | | GSGSGTDFTLSINSVESEDIADYYCQQNNNWPTTF |
| | | | | GAGTKLELKR |

### Example 2.10

### Generation of EGFR (Seq. 2) and IGF1,2 DVD-Igs

TABLE 63

| | DVD | Outer | Inner | |
|---|---|---|---|---|
| SEQ | Variable | Variable | Variable | |
| ID | Domain | Domain | Domain | Sequence |
| NO | Name | Name | Name | 12345678901234567890123456789012345 |
| 148 | DVD019H | AB033VH | AB010VH | QVQLKQSGPGLVQPSQSLSITCTVSGFSLTNYGVH |
| | | | | WVRQSPGKGLEWLGVIWSGGNTDYNTPFTSRLSIN |
| | | | | KDNSKSQVFFKMNSLQSNDTAIYYCARALTYYDYE |
| | | | | FAYWGQGTLVTVSAASTKGPQVQLVQSGAEVKKPG |
| | | | | ASVKVSCKASGYTFTSYDINWVRQATGQGLEWMGW |
| | | | | MNPNSGNTGYAQKFQGRVTMTRNTSISTAYMELSS |
| | | | | LRSEDTAVYYCARDPYYYYYGMDVWGQGTTVTVSS |
| 149 | DVD019L | AB033VL | AB010VL | DILLTQSPVILSVSPGERVSFSCRASQSIGTNIHW |
| | | | | YQQRTNGSPRLLIKYASESISGIPSRFSGSGSGTD |
| | | | | FTLSINSVESEDIADYYCQQNNNWPTTFGAGTKLE |
| | | | | LKRTVAAPQSVLTQPPSVSAAPGQKVTISCSGSSS |
| | | | | NIENNHVSWYQQLPGTAPKLLIYDNNKRPSGIPDR |
| | | | | FSGSKSGTSATLGITGLQTGDEADYYCETWDTSLS |
| | | | | AGRVFGGGTKLTVLG |
| 150 | DVD020H | AB010VH | AB033VH | QVQLVQSGAEVKKPGASVKVSCKASGYTFTSYDIN |
| | | | | WVRQATGQGLEWMGWMNPNSGNTGYAQKFQGRVTM |
| | | | | TRNTSISTAYMELSSLRSEDTAVYYCARDPYYYYY |
| | | | | GMDVWGQGTTVTVSSASTKGPQVQLKQSGPGLVQP |
| | | | | SQSLSITCTVSGFSLTNYGVHWVRQSPGKGLEWLG |
| | | | | VIWSGGNTDYNTPFTSRLSINKDNSKSQVFFKMNS |
| | | | | LQSNDTAIYYCARALTYYDYEFAYWGQGTLVTVSA |
| 151 | DVD020L | AB010VL | AB033VL | QSVLTQPPSVSAAPGQKVTISCSGSSSNIENNHVS |
| | | | | WYQQLPGTAPKLLIYDNNKRPSGIPDRFSGSKSGT |
| | | | | SATLGITGLQTGDEADYYCETWDTSLSAGRVFGGG |
| | | | | TKLAVLGQPKAAPDILLTQSPVILSVSPGERVSFS |
| | | | | CRASQSIGTNIHWYQQRTNGSPRLLIKYASESISG |
| | | | | IPSRFSGSGSGTDFTLSINSVESEDIADYYCQQNN |
| | | | | NWPTTFGAGTKLELKR |

### Example 2.11

### Generation of EGFR (Seq. 2) and IGF1R (Seq. 1) DVD-Igs with Linker Set 1

TABLE 64

| | DVD | Outer | Inner | |
|---|---|---|---|---|
| SEQ | Variable | Variable | Variable | |
| ID | Domain | Domain | Domain | Sequence |
| NO | Name | Name | Name | 12345678901234567890123456789012345 |
| 152 | DVD021H | AB033VH | AB011VH | QVQLKQSGPGLVQPSQSLSITCTVSGFSLTNYGVH |
| | | | | WVRQSPGKGLEWLGVIWSGGNTDYNTPFTSRLSIN |
| | | | | KDNSKSQVFFKMNSLQSNDTAIYYCARALTYYDYE |
| | | | | FAYWGQGTLVTVSAASTKGPEVQLLESGGGLVQPG |
| | | | | GSLRLSCTASGFTFSSYAMNWVRQAPGKGLEWVSA |
| | | | | ISGSGGTTFYADSVKGRFTISRDNSRTTLYLQMNS |
| | | | | LRAEDTAVYYCAKDLGWSDSYYYYYGMDVWGQGTT |
| | | | | VTVSS |
| 153 | DVD021L | AB033VL | AB011VL | DILLTQSPVILSVSPGERVSFSCRASQSIGTNIHW |
| | | | | YQQRTNGSPRLLIKYASESISGIPSRFSGSGSGTD |
| | | | | FTLSINSVESEDIADYYCQQNNNWPTTFGAGTKLE |
| | | | | LKRTVAAPDIQMTQFPSSLSASVGDRVTITCRASQ |
| | | | | GIRNDLGWYQQKPGKAPKRLIYAASRLHRGVPSRF |
| | | | | SGSGSGTEFTLTISSLQPEDFATYYCLQHNSYPCS |
| | | | | FGQGTKLEIKR |
| 154 | DVD022H | AB011VH | AB033VH | EVQLLESGGGLVQPGGSLRLSCTASGFTFSSYAMN |
| | | | | WVRQAPGKGLEWVSAISGSGGTTFYADSVKGRFTI |
| | | | | SRDNSRTTLYLQMNSLRAEDTAVYYCAKDLGWSDS |
| | | | | YYYYYGMDVWGQGTTVTVSSASTKGPQVQLKQSGP |
| | | | | GLVQPSQSLSITCTVSGFSLTNYGVHWVRQSPGKG |
| | | | | LEWLGVIWSGGNTDYNTPFTSRLSINKDNSKSQVF |
| | | | | FKMNSLQSNDTAIYYCARALTYYDYEFAYWGQGTL |
| | | | | VTVSA |
| 155 | DVD022L | AB011VL | AB033VL | DIQMTQFPSSLSASVGDRVTITCRASQGIRNDLGW |
| | | | | YQQKPGKAPKRLIYAASRLHRGVPSRFSGSGSGTE |
| | | | | FTLTISSLQPEDFATYYCLQHNSYPCSFGQGTKLE |
| | | | | IKRTVAAPDILLTQSPVILSVSPGERVSFSCRASQ |
| | | | | SIGTNIHWYQQRTNGSPRLLIKYASESISGIPSRF |
| | | | | SGSGSGTDFTLSINSVESEDIADYYCQQNNNWPTT |
| | | | | FGAGTKLELKR |

### Example 2.12

### Generation of EGFR (Seq. 2) and IGF1R (Seq. 1) DVD-Igs with Linker Set 2

TABLE 65

| | DVD | Outer | Inner | |
|---|---|---|---|---|
| SEQ | Variable | Variable | Variable | |
| ID | Domain | Domain | Domain | Sequence |
| NO | Name | Name | Name | 12345678901234567890123456789012345 |
| 156 | DVD611H | AB011VH | AB033VH | EVQLLESGGGLVQPGGSLRLSCTASGFTFSSYAMN |
| | | | | WVRQAPGKGLEWVSAISGSGGTTFYADSVKGRFTI |
| | | | | SRDNSRTTLYLQMNSLRAEDTAVYYCAKDLGWSDS |
| | | | | YYYYYGMDVWGQGTTVTVSSASTKGPSVFPLAPQV |
| | | | | QLKQSGPGLVQPSQSLSITCTVSGFSLTNYGVHWV |
| | | | | RQSPGKGLEWLGVIWSGGNTDYNTPFTSRLSINKD |
| | | | | NSKSQVFFKMNSLQSNDTAIYYCARALTYYDYEFA |
| | | | | YWGQGTLVTVSA |
| 157 | DVD611L | AB011VL | AB033VL | DIQMTQFPSSLSASVGDRVTITCRASQGIRNDLGW |
| | | | | YQQKPGKAPKRLIYAASRLHRGVPSRFSGSGSGTE |
| | | | | FTLTISSLQPEDFATYYCLQHNSYPCSFGQGTKLE |
| | | | | IKRTVAAPSVFIFPPDILLTQSPVILSVSPGERVS |
| | | | | FSCRASQSIGTNIHWYQQRTNGSPRLLIKYASESI |
| | | | | SGIPSRFSGSGSGTDFTLSINSVESEDIADYYCQQ |
| | | | | NNNWPTTFGAGTKLELKR |
| 158 | DVD612H | AB033VH | AB011VH | QVQLKQSGPGLVQPSQSLSITCTVSGFSLTNYGVH |
| | | | | WVRQSPGKGLEWLGVIWSGGNTDYNTPFTSRLSIN |
| | | | | KDNSKSQVFFKMNSLQSNDTAIYYCARALTYYDYE |
| | | | | FAYWGQGTLVTVSAASTKGPSVFPLAPEVQLLESG |
| | | | | GGLVQPGGSLRLSCTASGFTFSSYAMNWVRQAPGK |
| | | | | GLEWVSAISGSGGTTFYADSVKGRFTISRDNSRTT |
| | | | | LYLQMNSLRAEDTAVYYCAKDLGWSDSYYYYYGMD |
| | | | | VWGQGTTVTVSS |
| 159 | DVD612L | AB033VL | AB011VL | DILLTQSPVILSVSPGERVSFSCRASQSIGTNTHW |
| | | | | YQQRTNGSPRLLIKYASESISGIPSRFSGSGSGTD |
| | | | | FTLSINSVESEDIADYYCQQNNNWPTTFGAGTKLE |
| | | | | LKRTVAAPSVFIFPPDIQMTQFPSSLSASVGDRVT |
| | | | | ITCRASQGIRNDLGWYQQKPGKAPKRLIYAASRLH |
| | | | | RGVPSRFSGSGSGTEFTLTISSLQPEDFATYYCLQ |
| | | | | HNSYPCSFGQGTKLEIKR |

### Example 2.13

### Generation of EGFR (Seq. 2) and IGF1R (Seq. 1) DVD-Igs with Linker Set 3

TABLE 66

| | DVD | Outer | Inner | |
|---|---|---|---|---|
| SEQ | Variable | Variable | Variable | |
| ID | Domain | Domain | Domain | Sequence |
| NO | Name | Name | Name | 12345678901234567890123456789012345 |
| 160 | DVD613H | AB011VH | AB033VH | EVQLLESGGGLVQPGGSLRLSCTASGFTFSSYAMN |
| | | | | WVRQAPGKGLEWVSAISGSGGTTFYADSVKGRFTI |
| | | | | SRDNSRTTLYLQMNSLRAEDTAVYYCAKDLGWSDS |
| | | | | YYYYYGMDVWGQGTTVTVSSASTKGPSVFPLAPQV |
| | | | | QLKQSGPGLVQPSQSLSITCTVSGFSLTNYGVHWV |
| | | | | RQSPGKGLEWLGVIWSGGNTDYNTPFTSRLSINKD |
| | | | | NSKSQVFFKMNSLQSNDTAIYYCARALTYYDYEFA |
| | | | | YWGQGTLVTVSA |
| 161 | DVD613L | AB011VL | AB033VL | DIQMTQFPSSLSASVGDRVTITCRASQGIRNDLGW |
| | | | | YQQKPGKAPKRLIYAASRLHRGVPSRFSGSGSGTE |
| | | | | FTLTISSLQPEDFATYYCLQHNSYPCSFGQGTKLE |
| | | | | IKRTVAAPDILLTQSPVILSVSPGERVSFSCRASQ |
| | | | | SIGTNIHWYQQRTNGSPRLLIKYASESISGIPSRF |
| | | | | SGSGSGTDFTLSINSVESEDIADYYCQQNNNWPTT |
| | | | | FGAGTKLELKR |
| 162 | DVD614H | AB033VH | AB011VH | QVQLKQSGPGLVQPSQSLSITCTVSGFSLTNYGVH |
| | | | | WVRQSPGKGLEWLGVIWSGGNTDYNTPFTSRLSIN |
| | | | | KDNSKSQVFFKMNSLQSNDTAIYYCARALTYYDYE |
| | | | | FAYWGQGTLVTVSAASTKGPSVFPLAPEVQLLESG |
| | | | | GGLVQPGGSLRLSCTASGFTFSSYAMNWVRQAPGK |
| | | | | GLEWVSAISGSGGTTFYADSVKGRFTISRDNSRTT |
| | | | | LYLQMNSLRAEDTAVYYCAKDLGWSDSYYYYYGMD |
| | | | | VWGQGTTVTVSS |
| 163 | DVD614L | AB033VL | AB011VL | DILLTQSPVILSVSPGERVSFSCRASQSIGTNIHW |
| | | | | YQQRTNGSPRLLIKYASESISGIPSRFSGSGSGTD |
| | | | | FTLSINSVESEDIADYYCQQNNNWPTTFGAGTKLE |
| | | | | LKRTVAAPDIQMTQFPSSLSASVGDRVTITCRASQ |
| | | | | GIRNDLGWYQQKPGKAPKRLIYAASRLHRGVPSRF |
| | | | | SGSGSGTEFTLTISSLQPEDFATYYCLQHNSYPCS |
| | | | | FGQGTKLEIKR |

### Example 2.14

### Generation of EGFR (Seq. 2) and IGF1R (Seq. 1) DVD-Igs with Linker Set 4

TABLE 67

| | DVD | Outer | Inner | |
|---|---|---|---|---|
| SEQ | Variable | Variable | Variable | |
| ID | Domain | Domain | Domain | Sequence |
| NO | Name | Name | Name | 12345678901234567890123456789012345 |
| 164 | DVD615H | AB011VH | AB033VH | EVQLLESGGGLVQPGGSLRLSCTASGFTFSSYAMN |
| | | | | WVRQAPGKGLEWVSAISGSGGTTFYADSVKGRFTI |
| | | | | SRDNSRTTLYLQMNSLRAEDTAVYYCAKDLGWSDS |
| | | | | YYYYYGMDVWGQGTTVTVSSASTKGPQVQLKQSGP |
| | | | | GLVQPSQSLSITCTVSGFSLTNYGVHWVRQSPGKG |
| | | | | LEWLGVIWSGGNTDYNTPFTSRLSINKDNSKSQVF |
| | | | | FKMNSLQSNDTAIYYCARALTYYDYEFAYWGQGTL |
| | | | | VTVSA |
| 165 | DVD615L | AB011VL | AB033VL | DIQMTQFPSSLSASVGDRVTITCRASQGIRNDLGW |
| | | | | YQQKPGKAPKRLIYAASRLHRGVPSRFSGSGSGTE |
| | | | | FTLTISSLQPEDFATYYCLQHNSYPCSFGQGTKLE |
| | | | | IKRTVAAPSVFIFPPDILLTQSPVILSVSPGERVS |
| | | | | FSCRASQSIGTNIHWYQQRTNGSPRLLIKYASESI |
| | | | | SGIPSRFSGSGSGTDFTLSINSVESEDIADYYCQQ |
| | | | | NNNWPTTFGAGTKLELKR |
| 166 | DVD616H | AB033VH | AB011VH | QVQLKQSGPGLVQPSQSLSITCTVSGFSLTNYGVH |
| | | | | WVRQSPGKGLEWLGVIWSGGNTDYNTPFTSRLSIN |
| | | | | KDNSKSQVFFKMNSLQSNDTAIYYCARALTYYDYE |
| | | | | FAYWGQGTLVTVSAASTKGPEVQLLESGGGLVQPG |
| | | | | GSLRLSCTASGFTFSSYAMNWVRQAPGKGLEWVSA |
| | | | | ISGSGGTTFYADSVKGRFTISRDNSRTTLYLQMNS |
| | | | | LRAEDTAVYYCAKDLGWSDSYYYYYGMDVWGQGTT |
| | | | | VTVSS |
| 167 | DVD616L | AB033VL | AB011VL | DILLTQSPVILSVSPGERVSFSCRASQSIGTNIHW |
| | | | | YQQRTNGSPRLLIKYASESISGIPSRFSGSGSGTD |
| | | | | FTLSINSVESEDIADYYCQQNNNWPTTFGAGTKLE |
| | | | | LKRTVAAPSVFIFPPDIQMTQFPSSLSASVGDRVT |
| | | | | ITCRASQGIRNDLGWYQQKPGKAPKRLIYAASRLH |
| | | | | RGVPSRFSGSGSGTEFTLTISSLQPEDFATYYCLQ |
| | | | | HNSYPCSFGQGTKLEIKR |

### Example 2.15

### Generation of EGFR (Seq. 2) and IGF1R (Seq. 2) DVD-Igs with Linker Set 1

TABLE 68

| | DVD | Outer | Inner | |
|---|---|---|---|---|
| SEQ | Variable | Variable | Variable | |
| ID | Domain | Domain | Domain | Sequence |
| NO | Name | Name | Name | 12345678901234567890123456789012345 |
| 168 | DVD603H | AB075VH | AB033VH | EVQLVQSGAEVKKPGSSVKVSCKASGGTFSSYAIS |
| | | | | WVRQAPGQGLEWMGGIIPIFGTANYAQKFQGRVTI |
| | | | | TADKSTSTAYMELSSLRSEDTAVYYCARAPLRFLE |
| | | | | WSTQDHYYYYYMDVWGKGTTVTVSSASTKGPQVQL |
| | | | | KQSGPGLVQPSQSLSITCTVSGFSLTNYGVHWVRQ |
| | | | | SPGKGLEWLGVIWSGGNTDYNTPFTSRLSINKDNS |
| | | | | KSQVFFKMNSLQSNDTAIYYCARALTYYDYEFAYW |
| | | | | GQGTLVTVSA |
| 169 | DVD603L | AB075VL | AB033VL | SSELTQDPAVSVALGQTVRITCQGDSLRSYYATWY |
| | | | | QQKPGQAPILVIYGENKRPSGIPDRFSGSSSGNTA |
| | | | | SLTITGAQAEDEADYYCKSRDGSGQHLVFGGGTKL |
| | | | | TVLGQPKAAPDILLTQSPVILSVSPGERVSFSCRA |
| | | | | SQSIGTNIHWYQQRTNGSPRLLIKYASESISGIPS |
| | | | | RFSGSGSGTDFTLSINSVESEDIADYYCQQNNNWP |
| | | | | TTFGAGTKLELKR |
| 170 | DVD604H | AB033VH | AB075VH | QVQLKQSGPGLVQPSQSLSITCTVSGFSLTNYGVH |
| | | | | WVRQSPGKGLEWLGVIWSGGNTDYNTPFTSRLSIN |
| | | | | KDNSKSQVFFKMNSLQSNDTAIYYCARALTYYDYE |
| | | | | FAYWGQGTLVTVSAASTKGPEVQLVQSGAEVKKPG |
| | | | | SSVKVSCKASGGTFSSYAISWVRQAPGQGLEWMGG |
| | | | | IIPIFGTANYAQKFQGRVTITADKSTSTAYMELSS |
| | | | | LRSEDTAVYYCARAPLRFLEWSTQDHYYYYYMDVW |
| | | | | GKGTTVTVSS |
| 171 | DVD604L | AB033VL | AB075VL | DILLTQSPVILSVSPGERVSFSCRASQSIGTNIHW |
| | | | | YQQRTNGSPRLLIKYASESISGIPSRFSGSGSGTD |
| | | | | FTLSINSVESEDIADYYCQQNNNWPTTFGAGTKLE |
| | | | | LKRTVAAPSSELTQDPAVSVALGQTVRITCQGDSL |
| | | | | RSYYATWYQQKPGQAPILVIYGENKRPSGIPDRFS |
| | | | | GSSSGNTASLTITGAQAEDEADYYCKSRDGSGQHL |
| | | | | VFGGGTKLTVLG |

### Example 2.16

### Generation of EGFR (Seq. 2) and IGF1R (Seq. 2) DVD-Igs with Linker Set 2

TABLE 69

| | DVD | Outer | Inner | |
|---|---|---|---|---|
| SEQ | Variable | Variable | Variable | |
| ID | Domain | Domain | Domain | Sequence |
| NO | Name | Name | Name | 12345678901234567890123456789012345 |
| 172 | DVD605H | AB075VH | AB033VH | EVQLVQSGAEVKKPGSSVKVSCKASGGTFSSYAIS |
| | | | | WVRQAPGQGLEWMGGIIPIFGTANYAQKFQGRVTI |
| | | | | TADKSTSTAYMELSSLRSEDTAVYYCARAPLRFLE |
| | | | | WSTQDHYYYYYMDVWGKGTTVTVSSASTKGPSVFP |
| | | | | LAPQVQLKQSGPGLVQPSQSLSITCTVSGFSLTNY |
| | | | | GVHWVRQSPGKGLEWLGVIWSGGNTDYNTPFTSRL |
| | | | | SINKDNSKSQVFFKMNSLQSNDTAIYYCARALTYY |
| | | | | DYEFAYWGQGTLVTVSA |
| 173 | DVD605L | AB075VL | AB033VL | SSELTQDPAVSVALGQTVRITCQGDSLRSYYATWY |
| | | | | QQKPGQAPILVIYGENKRPSGIPDRFSGSSSGNTA |
| | | | | SLTITGAQAEDEADYYCKSRDGSGQHLVFGGGTKL |
| | | | | TVLGQPKAAPSVTLFPPDILLTQSPVILSVSPGER |
| | | | | VSFSCRASQSIGTNIHWYQQRTNGSPRLLIKYASE |
| | | | | SISGIPSRFSGSGSGTDFTLSINSVESEDIADYYC |
| | | | | QQNNNWPTTFGAGTKLELKR |
| 174 | DVD606H | AB033VH | AB075VH | QVQLKQSGPGLVQPSQSLSITCTVSGFSLTNYGVH |
| | | | | WVRQSPGKGLEWLGVIWSGGNTDYNTPFTSRLSIN |
| | | | | KDNSKSQVFFKMNSLQSNDTAIYYCARALTYYDYE |
| | | | | FAYWGQGTLVTVSAASTKGPSVFPLAPEVQLVQSG |
| | | | | AEVKKPGSSVKVSCKASGGTFSSYAISWVRQAPGQ |
| | | | | GLEWMGGIIPIFGTANYAQKFQGRVTITADKSTST |
| | | | | AYMELSSLRSEDTAVYYCARAPLRFLEWSTQDHYY |
| | | | | YYYMDVWGKGTTVTVSS |
| 175 | DVD606L | AB033VL | AB075VL | DILLTQSPVILSVSPGERVSFSCRASQSIGTNIHW |
| | | | | YQQRTNGSPRLLIKYASESISGIPSRFSGSGSGTD |
| | | | | FTLSINSVESEDIADYYCQQNNNWPTTFGAGTKLE |
| | | | | LKRTVAAPSVFIFPPSSELTQDPAVSVALGQTVRI |
| | | | | TCQGDSLRSYYATWYQQKPGQAPILVIYGENKRPS |
| | | | | GIPDRFSGSSSGNTASLTITGAQAEDEADYYCKSR |
| | | | | DGSGQHLVFGGGTKLTVLG |

### Example 2.17

### Generation of EGFR (Seq. 2) and IGF1R (Seq. 2) DVD-Igs with Linker Set 3

TABLE 70

| | DVD | Outer | Inner | |
|---|---|---|---|---|
| SEQ | Variable | Variable | Variable | |
| ID | Domain | Domain | Domain | Sequence |
| NO | Name | Name | Name | 12345678901234567890123456789012345 |
| 176 | DVD607H | AB075VH | AB033VH | EVQLVQSGAEVKKPGSSVKVSCKASGGTFSSYAIS |
| | | | | WVRQAPGQGLEWMGGIIPIFGTANYAQKFQGRVTI |
| | | | | TADKSTSTAYMELSSLRSEDTAVYYCARAPLRFLE |
| | | | | WSTQDHYYYYYMDVWGKGTTVTVSSASTKGPSVFP |
| | | | | LAPQVQLKQSGPGLVQPSQSLSITCTVSGFSLTNY |
| | | | | GVHWVRQSPGKGLEWLGVIWSGGNTDYNTPFTSRL |
| | | | | SINKDNSKSQVFFKMNSLQSNDTAIYYCARALTYY |
| | | | | DYEFAYWGQGTLVTVSA |
| 177 | DVD607L | AB075VL | AB033VL | SSELTQDPAVSVALGQTVRITCQGDSLRSYYATWY |
| | | | | QQKPGQAPILVIYGENKRPSGIPDRFSGSSSGNTA |
| | | | | SLTITGAQAEDEADYYCKSRDGSGQHLVFGGGTKL |
| | | | | TVLGQPKAAPDILLTQSPVILSVSPGERVSFSCRA |
| | | | | SQSIGTNIHWYQQRTNGSPRLLIKYASESISGIPS |
| | | | | RFSGSGSGTDFTLSINSVESEDIADYYCQQNNNWP |
| | | | | TTFGAGTKLELKR |
| 178 | DVD608H | AB033VH | AB075VH | QVQLKQSGPGLVQPSQSLSITCTVSGFSLTNYGVH |
| | | | | WVRQSPGKGLEWLGVIWSGGNTDYNTPFTSRLSIN |
| | | | | KDNSKSQVFFKMNSLQSNDTAIYYCARALTYYDYE |
| | | | | FAYWGQGTLVTVSAASTKGPSVFPLAPEVQLVQSG |
| | | | | AEVKKPGSSVKVSCKASGGTFSSYAISWVRQAPGQ |
| | | | | GLEWMGGIIPIFGTANYAQKFQGRVTITADKSTST |
| | | | | AYMELSSLRSEDTAVYYCARAPLRFLEWSTQDHYY |
| | | | | YYYMDVWGKGTTVTVSS |
| 179 | DVD608L | AB033VL | AB075VL | DILLTQSPVILSVSPGERVSFSCRASQSIGTNIHW |
| | | | | YQQRTNGSPRLLIKYASESISGIPSRFSGSGSGTD |
| | | | | FTLSINSVESEDIADYYCQQNNNWPTTFGAGTKLE |
| | | | | LKRTVAAPSSELTQDPAVSVALGQTVRITCQGDSL |
| | | | | RSYYATWYQQKPGQAPILVIYGENKRPSGIPDRFS |
| | | | | GSSSGNTASLTITGAQAEDEADYYCKSRDGSGQHL |
| | | | | VFGGGTKLTVLG |

### Example 2.18

### Generation of EGFR (Seq. 2) and IGF1R (Seq. 2) DVD-Igs with Linker Set 4

TABLE 71

| | DVD | Outer | Inner | |
|---|---|---|---|---|
| SEQ | Variable | Variable | Variable | |
| ID | Domain | Domain | Domain | Sequence |
| NO | Name | Name | Name | 12345678901234567890123456789012345 |
| 180 | DVD609H | AB075VH | AB033VH | EVQLVQSGAEVKKPGSSVKVSCKASGGTFSSYAIS |
| | | | | WVRQAPGQGLEWMGGIIPIFGTANYAQKFQGRVTI |
| | | | | TADKSTSTAYMELSSLRSEDTAVYYCARAPLRFLE |
| | | | | WSTQDHYYYYYMDVWGKGTTVTVSSASTKGPQVQL |
| | | | | KQSGPGLVQPSQSLSITCTVSGFSLTNYGVHWVRQ |
| | | | | SPGKGLEWLGVIWSGGNTDYNTPFTSRLSINKDNS |
| | | | | KSQVFFKMNSLQSNDTAIYYCARALTYYDYEFAYW |
| | | | | GQGTLVTVSA |
| 181 | DVD609L | AB075VL | AB033VL | SSELTQDPAVSVALGQTVRITCQGDSLRSYYATWY |
| | | | | QQKPGQAPILVIYGENKRPSGIPDRFSGSSSGNTA |
| | | | | SLTITGAQAEDEADYYCKSRDGSGQHLVFGGGTKL |
| | | | | TVLGQPKAAPSVTLFPPDILLTQSPVILSVSPGER |
| | | | | VSFSCRASQSIGTNIHWYQQRTNGSPRLLIKYASE |
| | | | | SISGIPSRFSGSGSGTDFTLSINSVESEDIADYYC |
| | | | | QQNNNWPTTFGAGTKLELKR |
| 182 | DVD610H | AB033VH | AB075VH | QVQLKQSGPGLVQPSQSLSITCTVSGFSLTNYGVH |
| | | | | WVRQSPGKGLEWLGVIWSGGNTDYNTPFTSRLSIN |
| | | | | KDNSKSQVFFKMNSLQSNDTAIYYCARALTYYDYE |
| | | | | FAYWGQGTLVTVSAASTKGPEVQLVQSGAEVKKPG |
| | | | | SSVKVSCKASGGTFSSYAISWVRQAPGQGLEWMGG |
| | | | | IIPIFGTANYAQKFQGRVTITADKSTSTAYMELSS |
| | | | | LRSEDTAVYYCARAPLRFLEWSTQDHYYYYYMDVW |
| | | | | GKGTTVTVSS |
| 183 | DVD610L | AB033VL | AB075VL | DILLTQSPVILSVSPGERVSFSCRASQSIGTNIHW |
| | | | | YQQRTNGSPRLLIKYASESISGIPSRFSGSGSGTD |
| | | | | FTLSINSVESEDIADYYCQQNNNWPTTFGAGTKLE |
| | | | | LKRTVAAPSVFIFPPSSELTQDPAVSVALGQTVRI |
| | | | | TCQGDSLRSYYATWYQQKPGQAPILVIYGENKRPS |
| | | | | GIPDRFSGSSSGNTASLTITGAQAEDEADYYCKSR |
| | | | | DGSGQHLVFGGGTKLTVLG |

### Example 2.19

### Generation of EGFR (Seq. 2) and IGF1R (Seq. 3) DVD-Igs with Linker Set 1

TABLE 72

| | DVD | Outer | Inner | |
|---|---|---|---|---|
| SEQ | Variable | Variable | Variable | |
| ID | Domain | Domain | Domain | Sequence |
| NO | Name | Name | Name | 12345678901234567890123456789012345 |
| 184 | DVD625H | AB077VH | AB033VH | EVQLVQSGGGLVKPGGSLRLSCAASGFTFSSFAMH |
| | | | | WVRQAPGKGLEWISVIDTRGATYYADSVKGRFTIS |
| | | | | RDNAKNSLYLQMNSLRAEDTAVYYCARLGNFYYGM |
| | | | | DVWGQGTTVTVSSASTKGPQVQLKQSGPGLVQPSQ |
| | | | | SLSITCTVSGFSLTNYGVHWVRQSPGKGLEWLGVI |
| | | | | WSGGNTDYNTPFTSRLSINKDNSKSQVFFKMNSLQ |
| | | | | SNDTAIYYCARALTYYDYEFAYWGQGTLVTVSA |
| 185 | DVD625L | AB077VL | AB033VL | EIVLTQSPGTLSVSPGERATLSCRASQSIGSSLHW |
| | | | | YQQKPGQAPRLLIKYASQSLSGIPDRFSGSGSGTD |
| | | | | FTLTISRLEPEDFAVYYCHQSSRLPHTFGQGTKVE |
| | | | | IKRTVAAPDILLTQSPVILSVSPGERVSFSCRASQ |
| | | | | SIGTNIHWYQQRTNGSPRLLIKYASESISGIPSRF |
| | | | | SGSGSGTDFTLSINSVESEDIADYYCQQNNNWPTT |
| | | | | FGAGTKLELKR |
| 186 | DVD626H | AB033VH | AB077VH | QVQLKQSGPGLVQPSQSLSITCTVSGFSLTNYGVH |
| | | | | WVRQSPGKGLEWLGVIWSGGNTDYNTPFTSRLSIN |
| | | | | KDNSKSQVFFKMNSLQSNDTAIYYCARALTYYDYE |
| | | | | FAYWGQGTLVTVSAASTKGPEVQLVQSGGGLVKPG |
| | | | | GSLRLSCAASGFTFSSFAMHWVRQAPGKGLEWISV |
| | | | | IDTRGATYYADSVKGRFTISRDNAKNSLYLQMNSL |
| | | | | RAEDTAVYYCARLGNFYYGMDVWGQGTTVTVSS |
| 187 | DVD626L | AB033VL | AB077VL | DILLTQSPVILSVSPGERVSFSCRASQSIGTNIHW |
| | | | | YQQRTNGSPRLLIKYASESISGIPSRFSGSGSGTD |
| | | | | FTLSINSVESEDIADYYCQQNNNWPTTFGAGTKLE |
| | | | | LKRTVAAPEIVLTQSPGTLSVSPGERATLSCRASQ |
| | | | | SIGSSLHWYQQKPGQAPRLLIKYASQSLSGIPDRF |
| | | | | SGSGSGTDFTLTISRLEPEDFAVYYCHQSSRLPHT |
| | | | | FGQGTKVEIKR |

### Example 2.20

### Generation of EGFR (Seq. 2) and IGF1R (Seq. 3) DVD-Igs with Linker Set 2

TABLE 73

| | DVD | Outer | Inner | |
|---|---|---|---|---|
| SEQ | Variable | Variable | Variable | |
| ID | Domain | Domain | Domain | Sequence |
| NO | Name | Name | Name | 12345678901234567890123456789012345 |
| 188 | DVD627H | AB077VH | AB033VH | EVQLVQSGGGLVKPGGSLRLSCAASGFTFSSFAMH |
| | | | | WVRQAPGKGLEWISVIDTRGATYYADSVKGRFTIS |
| | | | | RDNAKNSLYLQMNSLRAEDTAVYYCARLGNFYYGM |
| | | | | DVWGQGTTVTVSSASTKGPSVFPLAPQVQLKQSGP |
| | | | | GLVQPSQSLSITCTVSGFSLTNYGVHWVRQSPGKG |
| | | | | LEWLGVIWSGGNTDYNTPFTSRLSINKDNSKSQVF |
| | | | | FKMNSLQSNDTAIYYCARALTYYDYEFAYWGQGTL |
| | | | | VTVSA |
| 189 | DVD627L | AB077VL | AB033VL | EIVLTQSPGTLSVSPGERATLSCRASQSIGSSLHW |
| | | | | YQQKPGQAPRLLIKYASQSLSGIPDRFSGSGSGTD |
| | | | | FTLTISRLEPEDFAVYYCHQSSRLPHTFGQGTKVE |
| | | | | IKRTVAAPSVFIFPPDILLTQSPVILSVSPGERVS |
| | | | | FSCRASQSIGTNIHWYQQRTNGSPRLLIKYASESI |
| | | | | SGIPSRFSGSGSGTDFTLSINSVESEDIADYYCQQ |
| | | | | NNNWPTTFGAGTKLELKR |
| 190 | DVD628H | AB033VH | AB077VH | QVQLKQSGPGLVQPSQSLSITCTVSGFSLTNYGVH |
| | | | | WVRQSPGKGLEWLGVIWSGGNTDYNTPFTSRLSIN |
| | | | | KDNSKSQVFFKMNSLQSNDTAIYYCARALTYYDYE |
| | | | | FAYWGQGTLVTVSAASTKGPSVFPLAPEVQLVQSG |
| | | | | GGLVKPGGSLRLSCAASGFTFSSFAMHWVRQAPGK |
| | | | | GLEWISVIDTRGATYYADSVKGRFTISRDNAKNSL |
| | | | | YLQMNSLRAEDTAVYYCARLGNFYYGMDVWGQGTT |
| | | | | VTVSS |
| 191 | DVD628L | AB033VL | AB077VL | DILLTQSPVILSVSPGERVSFSCRASQSIGTNIHW |
| | | | | YQQRTNGSPRLLIKYASESISGIPSRFSGSGSGTD |
| | | | | FTLSINSVESEDIADYYCQQNNNWPTTFGAGTKLE |
| | | | | LKRTVAAPSVFIFPPEIVLTQSPGTLSVSPGERAT |
| | | | | LSCRASQSIGSSLHWYQQKPGQAPRLLIKYASQSL |
| | | | | SGIPDRFSGSGSGTDFTLTISRLEPEDFAVYYCHQ |
| | | | | SSRLPHTFGQGTKVEIKR |

### Example 2.21

### Generation of EGFR (Seq. 2) and IGF1R (Seq. 3) DVD-Igs with Linker Set 3

TABLE 74

| | DVD | Outer | Inner | |
|---|---|---|---|---|
| SEQ | Variable | Variable | Variable | |
| ID | Domain | Domain | Domain | Sequence |
| NO | Name | Name | Name | 12345678901234567890123456789012345 |
| 192 | DVD629H | AB077VH | AB033VH | EVQLVQSGGGLVKPGGSLRLSCAASGFTFSSFAMH |
| | | | | WVRQAPGKGLEWISVIDTRGATYYADSVKGRFTIS |
| | | | | RDNAKNSLYLQMNSLRAEDTAVYYCARLGNFYYGM |
| | | | | DVWGQGTTVTVSSASTKGPSVFPLAPQVQLKQSGP |
| | | | | GLVQPSQSLSITCTVSGFSLTNYGVHWVRQSPGKG |
| | | | | LEWLGVIWSGGNTDYNTPFTSRLSINKDNSKSQVF |
| | | | | FKMNSLQSNDTAIYYCARALTYYDYEFAYWGQGTL |
| | | | | VTVSA |
| 193 | DVD629L | AB077VL | AB033VL | EIVLTQSPGTLSVSPGERATLSCRASQSIGSSLHW |
| | | | | YQQKPGQAPRLLIKYASQSLSGIPDRFSGSGSGTD |
| | | | | FTLTISRLEPEDFAVYYCHQSSRLPHTFGQGTKVE |
| | | | | IKRTVAAPDILLTQSPVILSVSPGERVSFSCRASQ |
| | | | | SIGTNIHWYQQRTNGSPRLLIKYASESISGIPSRF |
| | | | | SGSGSGTDFTLSINSVESEDIADYYCQQNNNWPTT |
| | | | | FGAGTKLELKR |
| 194 | DVD630H | AB033VH | AB077VH | QVQLKQSGPGLVQPSQSLSITCTVSGFSLTNYGVH |
| | | | | WVRQSPGKGLEWLGVIWSGGNTDYNTPFTSRLSIN |
| | | | | KDNSKSQVFFKMNSLQSNDTAIYYCARALTYYDYE |
| | | | | FAYWGQGTLVTVSAASTKGPSVFPLAPEVQLVQSG |
| | | | | GGLVKPGGSLRLSCAASGFTFSSFAMHWVRQAPGK |
| | | | | GLEWISVIDTRGATYYADSVKGRFTISRDNAKNSL |
| | | | | YLQMNSLRAEDTAVYYCARLGNFYYGMDVWGQGTT |
| | | | | VTVSS |
| 195 | DVD630L | AB033VL | AB077VL | DILLTQSPVILSVSPGERVSFSCRASQSIGTNIHW |
| | | | | YQQRTNGSPRLLIKYASESISGIPSRFSGSGSGTD |
| | | | | FTLSINSVESEDIADYYCQQNNNWPTTFGAGTKLE |
| | | | | LKRTVAAPEIVLTQSPGTLSVSPGERATLSCRASQ |
| | | | | SIGSSLHWYQQKPGQAPRLLIKYASQSLSGIPDRF |
| | | | | SGSGSGTDFTLTISRLEPEDFAVYYCHQSSRLPHT |
| | | | | FGQGTKVEIKR |

### Example 2.22

### Generation of EGFR (Seq. 2) and IGF1R (Seq. 3) DVD-Igs with Linker Set 4

TABLE 75

| | DVD | Outer | Inner | |
|---|---|---|---|---|
| SEQ | Variable | Variable | Variable | |
| ID | Domain | Domain | Domain | Sequence |
| NO | Name | Name | Name | 12345678901234567890123456789012345 |
| 196 | DVD631H | AB077VH | AB033VH | EVQLVQSGGGLVKPGGSLRLSCAASGFTFSSFAMH |
| | | | | WVRQAPGKGLEWISVIDTRGATYYADSVKGRFTIS |
| | | | | RDNAKNSLYLQMNSLRAEDTAVYYCARLGNFYYGM |
| | | | | DVWGQGTTVTVSSASTKGPQVQLKQSGPGLVQPSQ |
| | | | | SLSITCTVSGFSLTNYGVHWVRQSPGKGLEWLGVI |
| | | | | WSGGNTDYNTPFTSRLSINKDNSKSQVFFKMNSLQ |
| | | | | SNDTAIYYCARALTYYDYEFAYWGQGTLVTVSA |
| 197 | DVD631L | AB077VL | AB033VL | EIVLTQSPGTLSVSPGERATLSCRASQSIGSSLHW |
| | | | | YQQKPGQAPRLLIKYASQSLSGIPDRFSGSGSGTD |
| | | | | FTLTISRLEPEDFAVYYCHQSSRLPHTFGQGTKVE |
| | | | | IKRTVAAPSVFIFPPDILLTQSPVILSVSPGERVS |
| | | | | FSCRASQSIGTNIHWYQQRTNGSPRLLIKYASESI |
| | | | | SGIPSRFSGSGSGTDFTLSINSVESEDIADYYCQQ |
| | | | | NNNWPTTFGAGTKLELKR |
| 198 | DVD632H | AB033VH | AB077VH | QVQLKQSGPGLVQPSQSLSITCTVSGFSLTNYGVH |
| | | | | WVRQSPGKGLEWLGVIWSGGNTDYNTPFTSRLSIN |
| | | | | KDNSKSQVFFKMNSLQSNDTAIYYCARALTYYDYE |
| | | | | FAYWGQGTLVTVSAASTKGPEVQLVQSGGGLVKPG |
| | | | | GSLRLSCAASGFTFSSFAMHWVRQAPGKGLEWISV |
| | | | | IDTRGATYYADSVKGRFTISRDNAKNSLYLQMNSL |
| | | | | RAEDTAVYYCARLGNFYYGMDVWGQGTTVTVSS |
| 199 | DVD632L | AB033VL | AB077VL | DILLTQSPVILSVSPGERVSFSCRASQSIGTNIHW |
| | | | | YQQRTNGSPRLLIKYASESISGIPSRFSGSGSGTD |
| | | | | FTLSINSVESEDIADYYCQQNNNWPTTFGAGTKLE |
| | | | | LKRTVAAPSVFIFPPEIVLTQSPGTLSVSPGERAT |
| | | | | LSCRASQSIGSSLHWYQQKPGQAPRLLIKYASQSL |
| | | | | SGIPDRFSGSGSGTDFTLTISRLEPEDFAVYYCHQ |
| | | | | SSRLPHTFGQGTKVEIKR |

### Example 2.23

### Generation of EGFR (Seq. 2) and RON (Seq. 1) DVD-Igs with Linker Set 1

TABLE 76

| | DVD | Outer | Inner | |
|---|---|---|---|---|
| SEQ | Variable | Variable | Variable | |
| ID | Domain | Domain | Domain | Sequence |
| NO | Name | Name | Name | 12345678901234567890123456789012345 |
| 200 | D023H | AB033VH | AB005VH | QVQLKQSGPGLVQPSQSLSITCTVSGFSLTNYGVH |
| | | | | WVRQSPGKGLEWLGVIWSGGNTDYNTPFTSRLSIN |
| | | | | KDNSKSQVFFKMNSLQSNDTAIYYCARALTYYDYE |
| | | | | FAYWGQGTLVTVSAASTKGPEVQLVQSGGGLVKPG |
| | | | | GSLRLSCAASGFTFSSYAMHWVRQAPGKGLEWVAV |
| | | | | ISYDGSNKYYADSVKGRFTISRDNSKNTLYLQMNS |
| | | | | LRAEDTAVYYCARFSGWPNNYYYYGMDVWGQGTTV |
| | | | | TVSS |
| 201 | DVD023L | AB033VL | AB005VL | DILLTQSPVILSVSPGERVSFSCRASQSIGTNIHW |
| | | | | YQQRTNGSPRLLIKYASESISGIPSRFSGSGSGTD |
| | | | | FTLSINSVESEDIADYYCQQNNNWPTTFGAGTKLE |
| | | | | LKRTVAAPDVVMTQSPLSLPVTPGEPASISCRSSQ |
| | | | | SLLHSNGFNYVDWYLQKPGQSPHLLIYFGSYRASG |
| | | | | VPDRFSGSGSGTDFTLKISRVEAEDVGVYYCMQAL |
| | | | | QTPPWTFGQGTKVEIRR |
| 202 | DVD024H | AB005VH | AB033VH | EVQLVQSGGGLVKPGGSLRLSCAASGFTFSSYAMH |
| | | | | WVRQAPGKGLEWVAVISYDGSNKYYADSVKGRFTI |
| | | | | SRDNSKNTLYLQMNSLRAEDTAVYYCARFSGWPNN |
| | | | | YYYYGMDVWGQGTTVTVSSASTKGPQVQLKQSGPG |
| | | | | LVQPSQSLSITCTVSGFSLTNYGVHWVRQSPGKGL |
| | | | | EWLGVIWSGGNTDYNTPFTSRLSINKDNSKSQVFF |
| | | | | KMNSLQSNDTAIYYCARALTYYDYEFAYWGQGTLV |
| | | | | TVSA |
| 203 | DVD024L | AB005VL | AB033VL | DVVMTQSPLSLPVTPGEPASISCRSSQSLLHSNGF |
| | | | | NYVDWYLQKPGQSPHLLIYFGSYRASGVPDRFSGS |
| | | | | GSGTDFTLKISRVEAEDVGVYYCMQALQTPPWTFG |
| | | | | QGTKVEIRRTVAAPDILLTQSPVILSVSPGERVSF |
| | | | | SCRASQSIGTNIHWYQQRTNGSPRLLIKYASESIS |
| | | | | GIPSRFSGSGSGTDFTLSINSVESEDIADYYCQQN |
| | | | | NNWPTTFGAGTKLELKR |

### Example 2.24

### Generation of EGFR (Seq. 2) and RON (Seq. 1) DVD-Igs with Linker Set 2

TABLE 77

| | DVD | Outer | Inner | |
|---|---|---|---|---|
| SEQ | Variable | Variable | Variable | |
| ID | Domain | Domain | Domain | Sequence |
| NO | Name | Name | Name | 12345678901234567890123456789012345 |
| 204 | DVD535H | AB005VH | AB033VH | EVQLVQSGGGLVKPGGSLRLSCAASGFTFSSYAMH |
| | | | | WVRQAPGKGLEWVAVISYDGSNKYYADSVKGRFTI |
| | | | | SRDNSKNTLYLQMNSLRAEDTAVYYCARFSGWPNN |
| | | | | YYYYGMDVWGQGTTVTVSSASTKGPSVFPLAPQVQ |
| | | | | LKQSGPGLVQPSQSLSITCTVSGFSLTNYGVHWVR |
| | | | | QSPGKGLEWLGVIWSGGNTDYNTPFTSRLSINKDN |
| | | | | SKSQVFFKMNSLQSNDTAIYYCARALTYYDYEFAY |
| | | | | WGQGTLVTVSA |
| 205 | DVD535L | AB005VL | AB033VL | DVVMTQSPLSLPVTPGEPASISCRSSQSLLHSNGF |
| | | | | NYVDWYLQKPGQSPHLLIYFGSYRASGVPDRFSGS |
| | | | | GSGTDFTLKISRVEAEDVGVYYCMQALQTPPWTFG |
| | | | | QGTKVEIRRTVAAPSVFIFPPDILLTQSPVILSVS |
| | | | | PGERVSFSCRASQSIGTNIHWYQQRTNGSPRLLIK |
| | | | | YASESISGIPSRFSGSGSGTDFTLSINSVESEDIA |
| | | | | DYYCQQNNNWPTTFGAGTKLELKR |
| 206 | DVD536H | AB033VH | AB005VH | QVQLKQSGPGLVQPSQSLSITCTVSGFSLTNYGVH |
| | | | | WVRQSPGKGLEWLGVIWSGGNTDYNTPFTSRLSIN |
| | | | | KDNSKSQVFFKMNSLQSNDTAIYYCARALTYYDYE |
| | | | | FAYWGQGTLVTVSAASTKGPSVFPLAPEVQLVQSG |
| | | | | GGLVKPGGSLRLSCAASGFTFSSYAMHWVRQAPGK |
| | | | | GLEWVAVISYDGSNKYYADSVKGRFTISRDNSKNT |
| | | | | LYLQMNSLRAEDTAVYYCARFSGWPNNYYYYGMDV |
| | | | | WGQGTTVTVSS |
| 207 | DVD536L | AB033VL | AB005VL | DILLTQSPVILSVSPGERVSFSCRASQSIGTNIHW |
| | | | | YQQRTNGSPRLLIKYASESISGIPSRFSGSGSGTD |
| | | | | FTLSINSVESEDIADYYCQQNNNWPTTFGAGTKLE |
| | | | | LKRTVAAPSVFIFPPDVVMTQSPLSLPVTPGEPAS |
| | | | | ISCRSSQSLLHSNGFNYVDWYLQKPGQSPHLLIYF |
| | | | | GSYRASGVPDRFSGSGSGTDFTLKISRVEAEDVGV |
| | | | | YYCMQALQTPPWTFGQGTKVEIRR |

### Example 2.25

### Generation of EGFR (Seq. 2) and RON (Seq. 1) DVD-Igs with Linker Set 3

TABLE 78

| | DVD | Outer | Inner | |
|---|---|---|---|---|
| SEQ | Variable | Variable | Variable | |
| ID | Domain | Domain | Domain | Sequence |
| NO | Name | Name | Name | 12345678901234567890123456789012345 |
| 208 | DVD537H | AB005VH | AB033VH | EVQLVQSGGGLVKPGGSLRLSCAASGFTFSSYAMH |
| | | | | WVRQAPGKGLEWVAVISYDGSNKYYADSVKGRFTI |
| | | | | SRDNSKNTLYLQMNSLRAEDTAVYYCARFSGWPNN |
| | | | | YYYYGMDVWGQGTTVTVSSASTKGPSVFPLAPQVQ |
| | | | | LKQSGPGLVQPSQSLSITCTVSGFSLTNYGVHWVR |
| | | | | QSPGKGLEWLGVIWSGGNTDYNTPFTSRLSINKDN |
| | | | | SKSQVFFKMNSLQSNDTAIYYCARALTYYDYEFAY |
| | | | | WGQGTLVTVSA |
| 209 | DVD537L | AB005VL | AB033VL | DVVMTQSPLSLPVTPGEPASISCRSSQSLLHSNGF |
| | | | | NYVDWYLQKPGQSPHLLIYFGSYRASGVPDRFSGS |
| | | | | GSGTDFTLKISRVEAEDVGVYYCMQALQTPPWTFG |
| | | | | QGTKVEIRRTVAAPDILLTQSPVILSVSPGERVSF |
| | | | | SCRASQSIGTNIHWYQQRTNGSPRLLIKYASESIS |
| | | | | GIPSRFSGSGSGTDFTLSINSVESEDIADYYCQQN |
| | | | | NNWPTTFGAGTKLELKR |
| 210 | DVD538H | AB033VH | AB005VH | QVQLKQSGPGLVQPSQSLSITCTVSGFSLTNYGVH |
| | | | | WVRQSPGKGLEWLGVIWSGGNTDYNTPFTSRLSIN |
| | | | | KDNSKSQVFFKMNSLQSNDTAIYYCARALTYYDYE |
| | | | | FAYWGQGTLVTVSAASTKGPSVFPLAPEVQLVQSG |
| | | | | GGLVKPGGSLRLSCAASGFTFSSYAMHWVRQAPGK |
| | | | | GLEWVAVISYDGSNKYYADSVKGRFTISRDNSKNT |
| | | | | LYLQMNSLRAEDTAVYYCARFSGWPNNYYYYGMDV |
| | | | | WGQGTTVTVSS |
| 211 | DVD538L | AB033VL | AB005VL | DILLTQSPVILSVSPGERVSFSCRASQSIGTNIHW |
| | | | | YQQRTNGSPRLLIKYASESISGIPSRFSGSGSGTD |
| | | | | FTLSINSVESEDIADYYCQQNNNWPTTFGAGTKLE |
| | | | | LKRTVAAPDVVMTQSPLSLPVTPGEPASISCRSSQ |
| | | | | SLLHSNGFNYVDWYLQKPGQSPHLLIYFGSYRASG |
| | | | | VPDRFSGSGSGTDFTLKISRVEAEDVGVYYCMQAL |
| | | | | QTPPWTFGQGTKVEIRR |

### Example 2.26

### Generation of EGFR (Seq. 2) and RON (Seq. 1) DVD-Igs with Linker Set 4

TABLE 79

| | DVD | Outer | Inner | |
|---|---|---|---|---|
| SEQ | Variable | Variable | Variable | |
| ID | Domain | Domain | Domain | Sequence |
| NO | Name | Name | Name | 12345678901234567890123456789012345 |
| 212 | DVD539H | AB005VH | AB033VH | EVQLVQSGGGLVKPGGSLRLSCAASGFTFSSYAMH |
| | | | | WVRQAPGKGLEWVAVISYDGSNKYYADSVKGRFTI |
| | | | | SRDNSKNTLYLQMNSLRAEDTAVYYCARFSGWPNN |
| | | | | YYYYGMDVWGQGTTVTVSSASTKGPQVQLKQSGPG |
| | | | | LVQPSQSLSITCTVSGFSLTNYGVHWVRQSPGKGL |
| | | | | EWLGVIWSGGNTDYNTPFTSRLSINKDNSKSQVFF |
| | | | | KMNSLQSNDTAIYYCARALTYYDYEFAYWGQGTLV |
| | | | | TVSA |
| 213 | DVD539L | AB005VL | AB033VL | DVVMTQSPLSLPVTPGEPASISCRSSQSLLHSNGF |
| | | | | NYVDWYLQKPGQSPHLLIYFGSYRASGVPDRFSGS |
| | | | | GSGTDFTLKISRVEAEDVGVYYCMQALQTPPWTFG |
| | | | | QGTKVEIRRTVAAPSVFIFPPDILLTQSPVILSVS |
| | | | | PGERVSFSCRASQSIGTNIHWYQQRTNGSPRLLIK |
| | | | | YASESISGIPSRFSGSGSGTDFTLSINSVESEDIA |
| | | | | DYYCQQNNNWPTTFGAGTKLELKR |
| 214 | DVD540H | AB033VH | AB005VH | QVQLKQSGPGLVQPSQSLSITCTVSGFSLTNYGVH |
| | | | | WVRQSPGKGLEWLGVIWSGGNTDYNTPFTSRLSIN |
| | | | | KDNSKSQVFFKMNSLQSNDTAIYYCARALTYYDYE |
| | | | | FAYWGQGTLVTVSAASTKGPEVQLVQSGGGLVKPG |
| | | | | GSLRLSCAASGFTFSSYAMHWVRQAPGKGLEWVAV |
| | | | | ISYDGSNKYYADSVKGRFTISRDNSKNTLYLQMNS |
| | | | | LRAEDTAVYYCARFSGWPNNYYYYGMDVWGQGTTV |
| | | | | TVSS |
| 215 | DVD540L | AB033VL | AB005VL | DILLTQSPVILSVSPGERVSFSCRASQSIGTNIHW |
| | | | | YQQRTNGSPRLLIKYASESISGIPSRFSGSGSGTD |
| | | | | FTLSINSVESEDIADYYCQQNNNWPTTFGAGTKLE |
| | | | | LKRTVAAPSVFIFPPDVVMTQSPLSLPVTPGEPAS |
| | | | | ISCRSSQSLLHSNGFNYVDWYLQKPGQSPHLLIYF |
| | | | | GSYRASGVPDRFSGSGSGTDFTLKISRVEAEDVGV |
| | | | | YYCMQALQTPPWTFGQGTKVEIRR |

### Example 2.27

### Generation of EGFR (Seq. 2) and HGF (Seq. 1) DVD-Igs

TABLE 80

| | DVD | Outer | Inner | |
|---|---|---|---|---|
| SEQ | Variable | Variable | Variable | |
| ID | Domain | Domain | Domain | Sequence |
| NO | Name | Name | Name | 12345678901234567890123456789012345 |
| 216 | DVD025H | AB033VH | AB012VH | QVQLKQSGPGLVQPSQSLSITCTVSGFSLTNYGVH |
| | | | | WVRQSPGKGLEWLGVIWSGGNTDYNTPFTSRLSIN |
| | | | | KDNSKSQVFFKMNSLQSNDTAIYYCARALTYYDYE |
| | | | | FAYWGQGTLVTVSAASTKGPQVQLVESGGGLVKPG |
| | | | | GSLRLSCAASGFTFSDYYMSWIRQAPGKGLEWVSY |
| | | | | ISSSGSTIYYADSVKGRFTISRDNAKNSLYLQMNS |
| | | | | LRAEDTAVYYCARDEYNSGWYVLFDYWGQGTLVTV |
| | | | | SS |
| 217 | DVD025L | AB033VL | AB012VL | DILLTQSPVILSVSPGERVSFSCRASQSIGTNIHW |
| | | | | YQQRTNGSPRLLIKYASESISGIPSRFSGSGSGTD |
| | | | | FTLSINSVESEDIADYYCQQNNNWPTTFGAGTKLE |
| | | | | LKRTVAAPDIQMTQSPSSVSASVGDRVTITCRASQ |
| | | | | GISSWLAWYQQKPGKAPNLLIYEASSLQSGVPSRF |
| | | | | GGSGSGTDFTLTISSLQPEDFATYYCQQANGFPWT |
| | | | | FGQGTKVEIKR |
| 218 | DVD026H | AB012VH | AB033VH | QVQLVESGGGLVKPGGSLRLSCAASGFTFSDYYMS |
| | | | | WIRQAPGKGLEWVSYISSSGSTIYYADSVKGRFTI |
| | | | | SRDNAKNSLYLQMNSLRAEDTAVYYCARDEYNSGW |
| | | | | YVLFDYWGQGTLVTVSSASTKGPQVQLKQSGPGLV |
| | | | | QPSQSLSITCTVSGFSLTNYGVHWVRQSPGKGLEW |
| | | | | LGVIWSGGNTDYNTPFTSRLSINKDNSKSQVFFKM |
| | | | | NSLQSNDTAIYYCARALTYYDYEFAYWGQGTLVTV |
| | | | | SA |
| 219 | DVD026L | AB012VL | AB033VL | DIQMTQSPSSVSASVGDRVTITCRASQGISSWLAW |
| | | | | YQQKPGKAPNLLIYEASSLQSGVPSRFGGSGSGTD |
| | | | | FTLTISSLQPEDFATYYCQQANGFPWTFGQGTKVE |
| | | | | IKRTVAAPDILLTQSPVILSVSPGERVSFSCRASQ |
| | | | | SIGTNIHWYQQRTNGSPRLLIKYASESISGIPSRF |
| | | | | SGSGSGTDFTLSINSVESEDIADYYCQQNNNWPTT |
| | | | | FGAGTKLELKR |

### Example 2.28

### Generation of EGFR (Seq. 2) and c-MET DVD-Igs

TABLE 81

| | DVD | Outer | Inner | |
|---|---|---|---|---|
| SEQ | Variable | Variable | Variable | |
| ID | Domain | Domain | Domain | Sequence |
| NO | Name | Name | Name | 12345678901234567890123456789012345 |
| 220 | DVD027H | AB033VH | AB013VH | QVQLKQSGPGLVQPSQSLSITCTVSGFSLTNYGVH |
| | | | | WVRQSPGKGLEWLGVIWSGGNTDYNTPFTSRLSIN |
| | | | | KDNSKSQVFFKMNSLQSNDTAIYYCARALTYYDYE |
| | | | | FAYWGQGTLVTVSAASTKGPQVQLQQSGPELVRPG |
| | | | | ASVKWSCPASGYTFTSYWLHWVKKQRPGQGLEWIG |
| | | | | MIDPSNSDTRFNPPNFKDKATLNVDRSSNTAYNLL |
| | | | | SSLTSADSAVYYCATYGSYVSPLDYWGQGTSVYVS |
| | | | | S |
| 221 | DVD027L | AB033VL | AB013VL | DILLTQSPVILSVSPGERVSFSCRASQSIGTNIHW |
| | | | | YQQRTNGSPRLLIKYASESISGIPSRFSGSGSGTD |
| | | | | FTLSINSVESEDIADYYCQQNNNWPTTFGAGTKLE |
| | | | | LKRTVAAPDIMMSQSPSSLTVSVGEKVTVSCKSSQ |
| | | | | SLLVTSSQKNYLAWYQQKPQQSPKLLIYWASTRES |
| | | | | GVPDRFTGSGSGTDFTLTITSVKADDLAVYYCQQY |
| | | | | YAYPWTFGDGTKLEIKR |
| 222 | DVD028H | AB013VH | AB033VH | QVQLQQSGPELVRPGASVKWSCPASGYTFTSYWLH |
| | | | | WVKKQRPGQGLEWIGMIDPSNSDTRFNPPNFKDKA |
| | | | | TLNVDRSSNTAYNLLSSLTSADSAVYYCATYGSYV |
| | | | | SPLDYWGQGTSVYVSSASTKGPQVQLKQSGPGLVQ |
| | | | | PSQSLSITCTVSGFSLTNYGVHWVRQSPGKGLEWL |
| | | | | GVIWSGGNTDYNTPFTSRLSINKDNSKSQVFFKMN |
| | | | | SLQSNDTAIYYCARALTYYDYEFAYWGQGTLVTVS |
| | | | | A |
| 223 | DVD028L | AB013VL | AB033VL | DIMMSQSPSSLTVSVGEKVTVSCKSSQSLLVTSSQ |
| | | | | KNYLAWYQQKPQQSPKLLIYWASTRESGVPDRFTG |
| | | | | SGSGTDFTLTITSVKADDLAVYYCQQYYAYPWTFG |
| | | | | DGTKLEIKRTVAAPDILLTQSPVILSVSPGERVSF |
| | | | | SCRASQSIGTNIHWYQQRTNGSPRLLIKYASESIS |
| | | | | GIPSRFSGSGSGTDFTLSINSVESEDIADYYCQQN |
| | | | | NNWPTTFGAGTKLELKR |

### Example 2.29

### Generation of HER-2 (Seq. 1) and IGF1,2 DVD-Igs

TABLE 82

| | DVD | Outer | Inner | |
|---|---|---|---|---|
| SEQ | Variable | Variable | Variable | |
| ID | Domain | Domain | Domain | Sequence |
| NO | Name | Name | Name | 12345678901234567890123456789012345 |
| 224 | DVD029H | AB004VH | AB010VH | EVQLVESGGGLVQPGGSLRLSCAASGFNIKDTYIH |
| | | | | WVRQAPGKGLEWVARIYPTNGYTRYADSVKGRFTI |
| | | | | SADTSKNTAYLQMNSLRAEDTAVYYCSRWGGDGFY |
| | | | | AMDYWGQGTLVTVSSASTKGPQVQLVQSGAEVKKP |
| | | | | GASVKVSCKASGYTFTSYDINWVRQATGQGLEWMG |
| | | | | WMNPNSGNTGYAQKFQGRVTMTRNTSISTAYMELS |
| | | | | SLRSEDTAVYYCARDPYYYYYGMDVWGQGTTVTVS |
| | | | | S |
| 225 | DVD029L | AB004VL | AB010VL | DIQMTQSPSSLSASVGDRVTITCRASQDVNTAVAW |
| | | | | YQQKPGKAPKLLIYSASFLYSGVPSRFSGSRSGTD |
| | | | | FTLTISSLQPEDFATYYCQQHYTTPPTFGQGTKVE |
| | | | | IKRTVAAPQSVLTQPPSVSAAPGQKVTISCSGSSS |
| | | | | NIENNHVSWYQQLPGTAPKLLIYDNNKRPSGIPDR |
| | | | | FSGSKSGTSATLGITGLQTGDEADYYCETWDTSLS |
| | | | | AGRVFGGGTKLTVLG |
| 226 | DVD030H | AB010VH | AB004VH | QVQLVQSGAEVKKPGASVKVSCKASGYTFTSYDIN |
| | | | | WVRQATGQGLEWMGWMNPNSGNTGYAQKFQGRVTM |
| | | | | TRNTSISTAYMELSSLRSEDTAVYYCARDPYYYYY |
| | | | | GMDVWGQGTTVTVSSASTKGPEVQLVESGGGLVQP |
| | | | | GGSLRLSCAASGFNIKDTYIHWVRQAPGKGLEWVA |
| | | | | RIYPTNGYTRYADSVKGRFTISADTSKNTAYLQMN |
| | | | | SLRAEDTAVYYCSRWGGDGFYAMDYWGQGTLVTVS |
| | | | | S |
| 227 | DVD030L | AB010VL | AB004VL | QSVLTQPPSVSAAPGQKVTISCSGSSSNIENNHVS |
| | | | | WYQQLPGTAPKLLIYDNNKRPSGIPDRFSGSKSGT |
| | | | | SATLGITGLQTGDEADYYCETWDTSLSAGRVFGGG |
| | | | | TKLTVLGQPKAAPDIQMTQSPSSLSASVGDRVTIT |
| | | | | CRASQDVNTAVAWYQQKPGKAPKLLIYSASFLYSG |
| | | | | VPSRFSGSRSGTDFTLTISSLQPEDFATYYCQQHY |
| | | | | TTPPTFGQGTKVEIKR |

### Example 2.30

### Generation of HER-2 (Seq. 1) and IGF1R DVD-Igs

TABLE 83

| | DVD | Outer | Inner | |
|---|---|---|---|---|
| SEQ | Variable | Variable | Variable | |
| ID | Domain | Domain | Domain | Sequence |
| NO | Name | Name | Name | 12345678901234567890123456789012345 |
| 228 | DVD031H | AB004VH | AB011VH | EVQLVESGGGLVQPGGSLRLSCAASGFNIKDTYIH |
| | | | | WVRQAPGKGLEWVARIYPTNGYTRYADSVKGRFTI |
| | | | | SADTSKNTAYLQMNSLRAEDTAVYYCSRWGGDGFY |
| | | | | AMDYWGQGTLVTVSSASTKGPEVQLLESGGGLVQP |
| | | | | GGSLRLSCTASGFTFSSYAMNWVRQAPGKGLEWVS |
| | | | | AISGSGGTTFYADSVKGRFTISRDNSRTTLYLQMN |
| | | | | SLRAEDTAVYYCAKDLGWSDSYYYYYGMDVWGQGT |
| | | | | TVTVSS |
| 229 | DVD031L | AB004VL | AB011VL | DIQMTQSPSSLSASVGDRVTITCRASQDVNTAVAW |
| | | | | YQQKPGKAPKLLIYSASFLYSGVPSRFSGSRSGTD |
| | | | | FTLTISSLQPEDFATYYCQQHYTTPPTFGQGTKVE |
| | | | | IKRTVAAPDIQMTQFPSSLSASVGDRVTITCRASQ |
| | | | | GIRNDLGWYQQKPGKAPKRLIYAASRLHRGVPSRF |
| | | | | SGSGSGTEFTLTISSLQPEDFATYYCLQHNSYPCS |
| | | | | FGQGTKLEIKR |
| 230 | DVD032H | AB011VH | AB004VH | EVQLLESGGGLVQPGGSLRLSCTASGFTFSSYAMN |
| | | | | WVRQAPGKGLEWVSAISGSGGTTFYADSVKGRFTI |
| | | | | SRDNSRTTLYLQMNSLRAEDTAVYYCAKDLGWSDS |
| | | | | YYYYYGMDVWGQGTTVTVSSASTKGPEVQLVESGG |
| | | | | GLVQPGGSLRLSCAASGFNIKDTYIHWVRQAPGKG |
| | | | | LEWVARIYPTNGYTRYADSVKGRFTISADTSKNTA |
| | | | | YLQMNSLRAEDTAVYYCSRWGGDGFYAMDYWGQGT |
| | | | | LVTVSS |
| 231 | DVD032L | AB011VL | AB004VL | DIQMTQFPSSLSASVGDRVTITCRASQGIRNDLGW |
| | | | | YQQKPGKAPKRLIYAASRLHRGVPSRFSGSGSGTE |
| | | | | FTLTISSLQPEDFATYYCLQHNSYPCSFGQGTKLE |
| | | | | IKRTVAAPDIQMTQSPSSLSASVGDRVTITCRASQ |
| | | | | DVNTAVAWYQQKPGKAPKLLIYSASFLYSGVPSRF |
| | | | | SGSRSGTDFTLTISSLQPEDFATYYCQQHYTTPPT |
| | | | | FGQGTKVEIKR |

### Example 2.31

### Generation of RON (Seq. 1) and HGF (Seq. 1) DVD-Igs

TABLE 84

| | DVD | Outer | Inner | |
|---|---|---|---|---|
| SEQ | Variable | Variable | Variable | |
| ID | Domain | Domain | Domain | Sequence |
| NO | Name | Name | Name | 12345678901234567890123456789012345 |
| 232 | DVD033H | AB005VH | AB012VH | EVQLVQSGGGLVKPGGSLRLSCAASGFTFSSYAMH |
| | | | | WVRQAPGKGLEWVAVISYDGSNKYYADSVKGRFTI |
| | | | | SRDNSKNTLYLQMNSLRAEDTAVYYCARFSGWPNN |
| | | | | YYYYGMDVWGQGTTVTVSSASTKGPQVQLVESGGG |
| | | | | LVKPGGSLRLSCAASGFTFSDYYMSWIRQAPGKGL |
| | | | | EWVSYISSSGSTIYYADSVKGRFTISRDNAKNSLY |
| | | | | LQMNSLRAEDTAVYYCARDEYNSGWYVLFDYWGQG |
| | | | | TLVTVSS |
| 233 | DVD033L | AB005VL | AB012VL | DVVMTQSPLSLPVTPGEPASISCRSSQSLLHSNGF |
| | | | | NYVDWYLQKPGQSPHLLIYFGSYRASGVPDRFSGS |
| | | | | GSGTDFTLKISRVEAEDVGVYYCMQALQTPPWTFG |
| | | | | QGTKVEIRRTVAAPDIQMTQSPSSVSASVGDRVTI |
| | | | | TCRASQGISSWLAWYQQKPGKAPNLLIYEASSLQS |
| | | | | GVPSRFGGSGSGTDFTLTISSLQPEDFATYYCQQA |
| | | | | NGFPWTFGQGTKVEIKR |
| 234 | DVD034H | AB012VH | AB005VH | QVQLVESGGGLVKPGGSLRLSCAASGFTFSDYYMS |
| | | | | WIRQAPGKGLEWVSYISSSGSTIYYADSVKGRFTI |
| | | | | SRDNAKNSLYLQMNSLRAEDTAVYYCARDEYNSGW |
| | | | | YVLFDYWGQGTLVTVSSASTKGPEVQLVQSGGGLV |
| | | | | KPGGSLRLSCAASGFTFSSYAMHWVRQAPGKGLEW |
| | | | | VAVISYDGSNKYYADSVKGRFTISRDNSKNTLYLQ |
| | | | | MNSLRAEDTAVYYCARFSGWPNNYYYYGMDVWGQG |
| | | | | TTVTVSS |
| 235 | DVD034L | AB012VL | AB005VL | DIQMTQSPSSVSASVGDRVTITCRASQGISSWLAW |
| | | | | YQQKPGKAPNLLIYEASSLQSGVPSRFGGSGSGTD |
| | | | | FTLTISSLQPEDFATYYCQQANGFPWTFGQGTKVE |
| | | | | IKRTVAAPDVVMTQSPLSLPVTPGEPASISCRSSQ |
| | | | | SLLHSNGFNYVDWYLQKPGQSPHLLIYFGSYRASG |
| | | | | VPDRFSGSGSGTDFTLKISRVEAEDVGVYYCMQAL |
| | | | | QTPPWTFGQGTKVEIRR |

### Example 2.32

### Generation of VEGF (Seq. 1) and EGFR (Seq. 2) DVD-Igs

TABLE 85

| | DVD | Outer | Inner | |
|---|---|---|---|---|
| SEQ | Variable | Variable | Variable | |
| ID | Domain | Domain | Domain | Sequence |
| NO | Name | Name | Name | 12345678901234567890123456789012345 |
| 236 | DVD035H | AB014VH | AB033VH | EVQLVESGGGLVQPGGSLRLSCAASGYTFTNYGMN |
| | | | | WVRQAPGKGLEWVGWINTYTGEPTYAADFKRRFTF |
| | | | | SLDTSKSTAYLQMNSLRAEDTAVYYCAKYPHYYGS |
| | | | | SHWYFDVWGQGTLVTVSSASTKGPQVQLKQSGPGL |
| | | | | VQPSQSLSITCTVSGFSLTNYGVHWVRQSPGKGLE |
| | | | | WLGVIWSGGNTDYNTPFTSRLSINKDNSKSQVFFK |
| | | | | MNSLQSNDTAIYYCARALTYYDYEFAYWGQGTLVT |
| | | | | VSA |
| 237 | DVD035L | AB014VL | AB033VL | DIQMTQSPSSLSASVGDRVTITCSASQDISNYLNW |
| | | | | YQQKPGKAPKVLIYFTSSLHSGVPSRFSGSGSGTD |
| | | | | FTLTISSLQPEDFATYYCQQYSTVPWTFGQGTKVE |
| | | | | IKRTVAAPDILLTQSPVILSVSPGERVSFSCRASQ |
| | | | | SIGTNIHWYQQRTNGSPRLLIKYASESISGIPSRF |
| | | | | SGSGSGTDFTLSINSVESEDIADYYCQQNNNWPTT |
| | | | | FGAGTKLELKR |
| 238 | DVD036H | AB033VH | AB014VH | QVQLKQSGPGLVQPSQSLSITCTVSGFSLTNYGVH |
| | | | | WVRQSPGKGLEWLGVIWSGGNTDYNTPFTSRLSIN |
| | | | | KDNSKSQVFFKMNSLQSNDTAIYYCARALTYYDYE |
| | | | | FAYWGQGTLVTVSAASTKGPEVQLVESGGGLVQPG |
| | | | | GSLRLSCAASGYTFTNYGMNWVRQAPGKGLEWVGW |
| | | | | INTYTGEPTYAADFKRRFTFSLDTSKSTAYLQMNS |
| | | | | LRAEDTAVYYCAKYPHYYGSSHWYFDVWGQGTLVT |
| | | | | VSS |
| 239 | DVD036L | AB033VL | AB014VL | DILLTQSPVILSVSPGERVSFSCRASQSIGTNIHW |
| | | | | YQQRTNGSPRLLIKYASESISGIPSRFSGSGSGTD |
| | | | | FTLSINSVESEDIADYYCQQNNNWPTTFGAGTKLE |
| | | | | LKRTVAAPDIQMTQSPSSLSASVGDRVTITCSASQ |
| | | | | DISNYLNWYQQKPGKAPKVLIYFTSSLHSGVPSRF |
| | | | | SGSGSGTDFTLTISSLQPEDFATYYCQQYSTVPWT |
| | | | | FGQGTKVEIKR |

### Example 2.33

### Generation of VEGF (Seq. 1) and HER-2 (Seq. 1) DVD-Igs

TABLE 86

| | DVD | Outer | Inner | |
|---|---|---|---|---|
| SEQ | Variable | Variable | Variable | |
| ID | Domain | Domain | Domain | Sequence |
| NO | Name | Name | Name | 12345678901234567890123456789012345 |
| 240 | DVD037H | AB014VH | AB004VH | EVQLVESGGGLVQPGGSLRLSCAASGYTFTNYGMN |
| | | | | WVRQAPGKGLEWVGWINTYTGEPTYAADFKRRFTF |
| | | | | SLDTSKSTAYLQMNSLRAEDTAVYYCAKYPHYYGS |
| | | | | SHWYFDVWGQGTLVTVSSASTKGPEVQLVESGGGL |
| | | | | VQPGGSLRLSCAASGFNIKDTYIHWVRQAPGKGLE |
| | | | | WVARIYPTNGYTRYADSVKGRFTISADTSKNTAYL |
| | | | | QMNSLRAEDTAVYYCSRWGGDGFYAMDYWGQGTLV |
| | | | | TVSS |
| 241 | DVD037L | AB014VL | AB004VL | DIQMTQSPSSLSASVGDRVTITCSASQDISNYLNW |
| | | | | YQQKPGKAPKVLIYFTSSLHSGVPSRFSGSGSGTD |
| | | | | FTLTISSLQPEDFATYYCQQYSTVPWTFGQGTKVE |
| | | | | IKRTVAAPDIQMTQSPSSLSASVGDRVTITCRASQ |
| | | | | DVNTAVAWYQQKPGKAPKLLIYSASFLYSGVPSRF |
| | | | | SGSRSGTDFTLTISSLQPEDFATYYCQQHYTTPPT |
| | | | | FGQGTKVEIKR |
| 242 | DVD038H | AB004VH | AB014VH | EVQLVESGGGLVQPGGSLRLSCAASGFNIKDTYIH |
| | | | | WVRQAPGKGLEWVARIYPTNGYTRYADSVKGRFTI |
| | | | | SADTSKNTAYLQMNSLRAEDTAVYYCSRWGGDGFY |
| | | | | AMDYWGQGTLVTVSSASTKGPEVQLVESGGGLVQP |
| | | | | GGSLRLSCAASGYTFTNYGMNWVRQAPGKGLEWVG |
| | | | | WINTYTGEPTYAADFKRRFTFSLDTSKSTAYLQMN |
| | | | | SLRAEDTAVYYCAKYPHYYGSSHWYFDVWGQGTLV |
| | | | | TVSS |
| 243 | DVD038L | AB004VL | AB014VL | DIQMTQSPSSLSASVGDRVTITCRASQDVNTAVAW |
| | | | | YQQKPGKAPKLLIYSASFLYSGVPSRFSGSRSGTD |
| | | | | FTLTISSLQPEDFATYYCQQHYTTPPTFGQGTKVE |
| | | | | IKRTVAAPDIQMTQSPSSLSASVGDRVTITCSASQ |
| | | | | DISNYLNWYQQKPGKAPKVLIYFTSSLHSGVPSRF |
| | | | | SGSGSGTDFTLTISSLQPEDFATYYCQQYSTVPWT |
| | | | | FGQGTKVEIKR |

### Example 2.34

### Generation of VEGF (Seq. 1) and CD-20 DVD-Igs

TABLE 87

| | DVD | Outer | Inner | |
|---|---|---|---|---|
| SEQ | Variable | Variable | Variable | |
| ID | Domain | Domain | Domain | Sequence |
| NO | Name | Name | Name | 12345678901234567890123456789012345 |
| 244 | DVD039H | AB014VH | AB001VH | EVQLVESGGGLVQPGGSLRLSCAASGYTFTNYGMN |
| | | | | WVRQAPGKGLEWVGWINTYTGEPTYAADFKRRFTF |
| | | | | SLDTSKSTAYLQMNSLRAEDTAVYYCAKYPHYYGS |
| | | | | SHWYFDVWGQGTLVTVSSASTKGPQVQLQQPGAEL |
| | | | | VKPGASVKMSCKASGYTFTSYNMHWVKQTPGRGLE |
| | | | | WIGAIYPGNGDTSYNQKFKGKATLTADKSSSTAYM |
| | | | | QLSSLTSEDSAVYYCARSTYYGGDWYFNVWGAGTT |
| | | | | VTVSA |
| 245 | DVD039L | AB014VL | AB001VL | DIQMTQSPSSLSASVGDRVTITCSASQDISNYLNW |
| | | | | YQQKPGKAPKVLIYFTSSLHSGVPSRFSGSGSGTD |
| | | | | FTLTISSLQPEDFATYYCQQYSTVPWTFGQGTKVE |
| | | | | IKRTVAAPQIVLSQSPAILSPSPGEKVTMTCRASS |
| | | | | SVSYIHWFQQKPGSSPKPWIYATSNLASGVPVRFS |
| | | | | GSGSGTSYSLTISRVEAEDAATYYCQQWTSNPPTF |
| | | | | GGGTKLEIKR |
| 246 | DVD040H | AB001VH | AB014VH | QVQLQQPGAELVKPGASVKMSCKASGYTFTSYNMH |
| | | | | WVKQTPGRGLEWIGAIYPGNGDTSYNQKFKGKATL |
| | | | | TADKSSSTAYMQLSSLTSEDSAVYYCARSTYYGGD |
| | | | | WYFNVWGAGTTVTVSAASTKGPEVQLVESGGGLVQ |
| | | | | PGGSLRLSCAASGYTFTNYGMNWVRQAPGKGLEWV |
| | | | | GWINTYTGEPTYAADFKRRFTFSLDTSKSTAYLQM |
| | | | | NSLRAEDTAVYYCAKYPHYYGSSHWYFDVWGQGTL |
| | | | | VTVSS |
| 247 | DVD040L | AB001VL | AB014VL | QIVLSQSPAILSPSPGEKVTMTCRASSSVSYIHWF |
| | | | | QQKPGSSPKPWIYATSNLASGVPVRFSGSGSGTSY |
| | | | | SLTISRVEAEDAATYYCQQWTSNPPTFGGGTKLEI |
| | | | | KRTVAAPDIQMTQSPSSLSASVGDRVTITCSASQD |
| | | | | ISNYLNWYQQKPGKAPKVLIYFTSSLHSGVPSRFS |
| | | | | GSGSGTDFTLTISSLQPEDFATYYCQQYSTVPWTF |
| | | | | GQGTKVEIKR |

### Example 2.35

### Generation of VEGF (Seq. 1) and IGF1,2 DVD-Igs

TABLE 88

| | DVD | Outer | Inner | |
|---|---|---|---|---|
| SEQ | Variable | Variable | Variable | |
| ID | Domain | Domain | Domain | Sequence |
| NO | Name | Name | Name | 12345678901234567890123456789012345 |
| 248 | DVD041H | AB014VH | AB010VH | EVQLVESGGGLVQPGGSLRLSCAASGYTFTNYGMN |
| | | | | WVRQAPGKGLEWVGWINTYTGEPTYAADFKRRFTF |
| | | | | SLDTSKSTAYLQMNSLRAEDTAVYYCAKYPHYYGS |
| | | | | SHWYFDVWGQGTLVTVSSASTKGPQVQLVQSGAEV |
| | | | | KKPGASVKVSCKASGYTFTSYDINWVRQATGQGLE |
| | | | | WMGWMNPNSGNTGYAQKFQGRVTMTRNTSISTAYM |
| | | | | ELSSLRSEDTAVYYCARDPYYYYYGMDVWGQGTTV |
| | | | | TVSS |
| 249 | DVD041L | AB014VL | AB010VL | DIQMTQSPSSLSASVGDRVTITCSASQDISNYLNW |
| | | | | YQQKPGKAPKVLIYFTSSLHSGVPSRFSGSGSGTD |
| | | | | FTLTISSLQPEDFATYYCQQYSTVPWTFGQGTKVE |
| | | | | IKRTVAAPQSVLTQPPSVSAAPGQKVTISCSGSSS |
| | | | | NIENNHVSWYQQLPGTAPKLLIYDNNKRPSGIPDR |
| | | | | FSGSKSGTSATLGITGLQTGDEADYYCETWDTSLS |
| | | | | AGRVFGGGTKLTVLG |
| 250 | DVD042H | AB010VH | AB014VH | QVQLVQSGAEVKKPGASVKVSCKASGYTFTSYDIN |
| | | | | WVRQATGQGLEWMGWMNPNSGNTGYAQKFQGRVTM |
| | | | | TRNTSISTAYMELSSLRSEDTAVYYCARDPYYYYY |
| | | | | GMDVWGQGTTVTVSSASTKGPEVQLVESGGGLVQP |
| | | | | GGSLRLSCAASGYTFTNYGMNWVRQAPGKGLEWVG |
| | | | | WINTYTGEPTYAADFKRRFTFSLDTSKSTAYLQMN |
| | | | | SLRAEDTAVYYCAKYPHYYGSSHWYFDVWGQGTLV |
| | | | | TVSS |
| 251 | DVD042L | AB010VL | AB014VL | QSVLTQPPSVSAAPGQKVTISCSGSSSNIENNHVS |
| | | | | WYQQLPGTAPKLLIYDNNKRPSGIPDRFSGSKSGT |
| | | | | SATLGITGLQTGDEADYYCETWDTSLSAGRVFGGG |
| | | | | TKLTVLGQPKAAPDIQMTQSPSSLSASVGDRVTIT |
| | | | | CSASQDISNYLNWYQQKPGKAPKVLIYFTSSLHSG |
| | | | | VPSRFSGSGSGTDFTLTISSLQPEDFATYYCQQYS |
| | | | | TVPWTFGQGTKVEIKR |

### Example 2.36

### Generation of VEGF (Seq. 1) and DLL4 (Seq. 1) DVD-Igs

TABLE 89

| | DVD | Outer | Inner | |
|---|---|---|---|---|
| SEQ | Variable | Variable | Variable | |
| ID | Domain | Domain | Domain | Sequence |
| NO | Name | Name | Name | 12345678901234567890123456789012345 |
| 252 | DVD043H | AB014VH | AB015VH | EVQLVESGGGLVQPGGSLRLSCAASGYTFTNYGMN |
| | | | | WVRQAPGKGLEWVGWINTYTGEPTYAADFKRRFTF |
| | | | | SLDTSKSTAYLQMNSLRAEDTAVYYCAKYPHYYGS |
| | | | | SHWYFDVWGQGTLVTVSSASTKGPEVQLVESGGGL |
| | | | | VQPGGSLRLSCAASGFTFTDNWISWVRQAPGKGLE |
| | | | | WVGYISPNSGFTYYADSVKGRFTISADTSKNTAYL |
| | | | | QMNSLRAEDTAVYYCARDNFGGYFDYWGQGTLVTV |
| | | | | SS |
| 253 | DVD043L | AB014VL | AB015VL | DIQMTQSPSSLSASVGDRVTITCSASQDISNYLNW |
| | | | | YQQKPGKAPKVLIYFTSSLHSGVPSRFSGSGSGTD |
| | | | | FTLTISSLQPEDFATYYCQQYSTVPWTFGQGTKVE |
| | | | | IKRTVAAPDIQMTQSPSSLSASVGDRVTITCRASQ |
| | | | | DVSTAVAWYQQKPGKAPKLLIYSASFLYSGVPSRF |
| | | | | SGSGSGTDFTLTISSLQPEDFATTYYCQQSYTGTV |
| | | | | TFGQGTKVEIKR |
| 254 | DVD044H | AB015VH | AB014VH | EVQLVESGGGLVQPGGSLRLSCAASGFTFTDNWIS |
| | | | | WVRQAPGKGLEWVGYISPNSGFTYYADSVKGRFTI |
| | | | | SADTSKNTAYLQMNSLRAEDTAVYYCARDNFGGYF |
| | | | | DYWGQGTLVTVSSASTKGPEVQLVESGGGLVQPGG |
| | | | | SLRLSCAASGYTFTNYGMNWVRQAPGKGLEWVGWI |
| | | | | NTYTGEPTYAADFKRRFTFSLDTSKSTAYLQMNSL |
| | | | | RAEDTAVYYCAKYPHYYGSSHWYFDVWGQGTLVTV |
| | | | | SS |
| 255 | DVD044L | AB015VL | AB014VL | DIQMTQSPSSLSASVGDRVTITCRASQDVSTAVAW |
| | | | | YQQKPGKAPKLLIYSASFLYSGVPSRFSGSGSGTD |
| | | | | FTLTISSLQPEDFATTYYCQQSYTGTVTFGQGTKV |
| | | | | EIKRTVAAPDIQMTQSPSSLSASVGDRVTITCSAS |
| | | | | QDISNYLNWYQQKPGKAPKVLIYFTSSLHSGVPSR |
| | | | | FSGSGSGTDFTLTISSLQPEDFATYYCQQYSTVPW |
| | | | | TFGQGTKVEIKR |

### Example 2.37

### Generation of VEGF (Seq. 1) and HGF (Seq. 1) DVD-Igs with Linker Set 1

TABLE 90

| | DVD | Outer | Inner | |
|---|---|---|---|---|
| SEQ | Variable | Variable | Variable | |
| ID | Domain | Domain | Domain | Sequence |
| NO | Name | Name | Name | 12345678901234567890123456789012345 |
| 256 | DVD045H | AB014VH | AB012VH | EVQLVESGGGLVQPGGSLRLSCAASGYTFTNYGMN |
| | | | | WVRQAPGKGLEWVGWINTYTGEPTYAADFKRRFTF |
| | | | | SLDTSKSTAYLQMNSLRAEDTAVYYCAKYPHYYGS |
| | | | | SHWYFDVWGQGTLVTVSSASTKGPQVQLVESGGGL |
| | | | | VKPGGSLRLSCAASGFTFSDYYMSWIRQAPGKGLE |
| | | | | WVSYISSSGSTIYYADSVKGRFTISRDNAKNSLYL |
| | | | | QMNSLRAEDTAVYYCARDEYNSGWYVLFDYWGQGT |
| | | | | LVTVSS |
| 257 | DVD045L | AB014VL | AB012VL | DIQMTQSPSSLSASVGDRVTITCSASQDISNYLNW |
| | | | | YQQKPGKAPKVLIYFTSSLHSGVPSRFSGSGSGTD |
| | | | | FTLTISSLQPEDFATYYCQQYSTVPWTFGQGTKVE |
| | | | | IKRTVAAPDIQMTQSPSSVSASVGDRVTITCRASQ |
| | | | | GISSWLAWYQQKPGKAPNLLIYEASSLQSGVPSRF |
| | | | | GGSGSGTDFTLTISSLQPEDFATYYCQQANGFPWT |
| | | | | FGQGTKVEIKR |
| 258 | DVD046H | AB012VH | AB014VH | QVQLVESGGGLVKPGGSLRLSCAASGFTFSDYYMS |
| | | | | WIRQAPGKGLEWVSYISSSGSTIYYADSVKGRFTI |
| | | | | SRDNAKNSLYLQMNSLRAEDTAVYYCARDEYNSGW |
| | | | | YVLFDYWGQGTLVTVSSASTKGPEVQLVESGGGLV |
| | | | | QPGGSLRLSCAASGYTFTNYGMNWVRQAPGKGLEW |
| | | | | VGWINTYTGEPTYAADFKRRFTFSLDTSKSTAYLQ |
| | | | | MNSLRAEDTAVYYCAKYPHYYGSSHWYFDVWGQGT |
| | | | | LVTVSS |
| 259 | DVD046L | AB012VL | AB014VL | DIQMTQSPSSVSASVGDRVTITCRASQGISSWLAW |
| | | | | YQQKPGKAPNLLIYEASSLQSGVPSRFGGSGSGTD |
| | | | | FTLTISSLQPEDFATYYCQQANGFPWTFGQGTKVE |
| | | | | IKRTVAAPDIQMTQSPSSLSASVGDRVTITCSASQ |
| | | | | DISNYLNWYQQKPGKAPKVLIYFTSSLHSGVPSRF |
| | | | | SGSGSGTDFTLTISSLQPEDFATYYCQQYSTVPWT |
| | | | | FGQGTKVEIKR |

### Example 2.38

### Generation of VEGF (Seq. 1) and HGF (Seq. 1) DVD-Igs with Linker Set 2

TABLE 91

| | DVD | Outer | Inner | |
|---|---|---|---|---|
| SEQ | Variable | Variable | Variable | |
| ID | Domain | Domain | Domain | Sequence |
| NO | Name | Name | Name | 12345678901234567890123456789012345 |
| 260 | DVD641H | AB012VH | AB014VH | QVQLVESGGGLVKPGGSLRLSCAASGFTFSDYYMS |
| | | | | WIRQAPGKGLEWVSYISSSGSTIYYADSVKGRFTI |
| | | | | SRDNAKNSLYLQMNSLRAEDTAVYYCARDEYNSGW |
| | | | | YVLFDYWGQGTLVTVSSASTKGPSVFPLAPEVQLV |
| | | | | ESGGGLVQPGGSLRLSCAASGYTFTNYGMNWVRQA |
| | | | | PGKGLEWVGWINTYTGEPTYAADFKRRFTFSLDTS |
| | | | | KSTAYLQMNSLRAEDTAVYYCAKYPHYYGSSHWYF |
| | | | | DVWGQGTLVTVSS |
| 261 | DVD641L | AB012VL | AB014VL | DIQMTQSPSSVSASVGDRVTITCRASQGISSWLAW |
| | | | | YQQKPGKAPNLLIYEASSLQSGVPSRFGGSGSGTD |
| | | | | FTLTISSLQPEDFATYYCQQANGFPWTFGQGTKVE |
| | | | | IKRTVAAPSVFIFPPDIQMTQSPSSLSASVGDRVT |
| | | | | ITCSASQDISNYLNWYQQKPGKAPKVLIYFTSSLH |
| | | | | SGVPSRFSGSGSGTDFTLTISSLQPEDFATYYCQQ |
| | | | | YSTVPWTFGQGTKVEIKR |
| 262 | DVD642H | AB014VH | AB012VH | EVQLVESGGGLVQPGGSLRLSCAASGYTFTNYGMN |
| | | | | WVRQAPGKGLEWVGWINTYTGEPTYAADFKRRFTF |
| | | | | SLDTSKSTAYLQMNSLRAEDTAVYYCAKYPHYYGS |
| | | | | SHWYFDVWGQGTLVTVSSASTKGPSVFPLAPQVQL |
| | | | | VESGGGLVKPGGSLRLSCAASGFTFSDYYMSWIRQ |
| | | | | APGKGLEWVSYISSSGSTIYYADSVKGRFTISRDN |
| | | | | AKNSLYLQMNSLRAEDTAVYYCARDEYNSGWYVLF |
| | | | | DYWGQGTLVTVSS |
| 263 | DVD642L | AB014VL | AB012VL | DIQMTQSPSSLSASVGDRVTITCSASQDISNYLNW |
| | | | | YQQKPGKAPKVLIYFTSSLHSGVPSRFSGSGSGTD |
| | | | | FTLTISSLQPEDFATYYCQQYSTVPWTFGQGTKVE |
| | | | | IKRTVAAPSVFIFPPDIQMTQSPSSVSASVGDRVT |
| | | | | ITCRASQGISSWLAWYQQKPGKAPNLLIYEASSLQ |
| | | | | SGVPSRFGGSGSGTDFTLTISSLQPEDFATYYCQQ |
| | | | | ANGFPWTFGQGTKVEIKR |

### Example 2.39

### Generation of VEGF (Seq. 1) and HGF (Seq. 1) DVD-Igs with Linker Set 3

TABLE 92

| | DVD | Outer | Inner | |
|---|---|---|---|---|
| SEQ | Variable | Variable | Variable | |
| ID | Domain | Domain | Domain | Sequence |
| NO | Name | Name | Name | 12345678901234567890123456789012345 |
| 264 | DVD647H | AB012VH | AB014VH | QVQLVESGGGLVKPGGSLRLSCAASGFTFSDYYMS |
| | | | | WIRQAPGKGLEWVSYISSSGSTIYYADSVKGRFTI |
| | | | | SRDNAKNSLYLQMNSLRAEDTAVYYCARDEYNSGW |
| | | | | YVLFDYWGQGTLVTVSSASTKGPSVFPLAPEVQLV |
| | | | | ESGGGLVQPGGSLRLSCAASGYTFTNYGMNWVRQA |
| | | | | PGKGLEWVGWINTYTGEPTYAADFKRRFTFSLDTS |
| | | | | KSTAYLQMNSLRAEDTAVYYCAKYPHYYGSSHWYF |
| | | | | DVWGQGTLVTVSS |
| 265 | DVD647L | AB012VL | AB014VL | DIQMTQSPSSVSASVGDRVTITCRASQGISSWLAW |
| | | | | YQQKPGKAPNLLIYEASSLQSGVPSRFGGSGSGTD |
| | | | | FTLTISSLQPEDFATYYCQQANGFPWTFGQGTKVE |
| | | | | IKRTVAAPDIQMTQSPSSLSASVGDRVTITCSASQ |
| | | | | DISNYLNWYQQKPGKAPKVLIYFTSSLHSGVPSRF |
| | | | | SGSGSGTDFTLTISSLQPEDFATYYCQQYSTVPWT |
| | | | | FGQGTKVEIKR |
| 266 | DVD648H | AB014VH | AB012VH | EVQLVESGGGLVQPGGSLRLSCAASGYTFTNYGMN |
| | | | | WVRQAPGKGLEWVGWINTYTGEPTYAADFKRRFTF |
| | | | | SLDTSKSTAYLQMNSLRAEDTAVYYCAKYPHYYGS |
| | | | | SHWYFDVWGQGTLVTVSSASTKGPSVFPLAPQVQL |
| | | | | VESGGGLVKPGGSLRLSCAASGFTFSDYYMSWIRQ |
| | | | | APGKGLEWVSYISSSGSTIYYADSVKGRFTISRDN |
| | | | | AKNSLYLQMNSLRAEDTAVYYCARDEYNSGWYVLF |
| | | | | DYWGQGTLVTVSS |
| 267 | DVD648L | AB014VL | AB012VL | DIQMTQSPSSLSASVGDRVTITCSASQDISNYLNW |
| | | | | YQQKPGKAPKVLIYFTSSLHSGVPSRFSGSGSGTD |
| | | | | FTLTISSLQPEDFATYYCQQYSTVPWTFGQGTKVE |
| | | | | IKRTVAAPDIQMTQSPSSVSASVGDRVTITCRASQ |
| | | | | GISSWLAWYQQKPGKAPNLLIYEASSLQSGVPSRF |
| | | | | GGSGSGTDFTLTISSLQPEDFATYYCQQANGFPWT |
| | | | | FGQGTKVEIKR |

### Example 2.40

### Generation of VEGF (Seq. 1) and HGF (Seq. 1) DVD-Igs with Linker Set 4

TABLE 93

| | DVD | Outer | Inner | |
|---|---|---|---|---|
| SEQ | Variable | Variable | Variable | |
| ID | Domain | Domain | Domain | Sequence |
| NO | Name | Name | Name | 12345678901234567890123456789012345 |
| 268 | DVD653H | AB012VH | AB014VH | QVQLVESGGGLVKPGGSLRLSCAASGFTFSDYYMS |
| | | | | WIRQAPGKGLEWVSYISSSGSTIYYADSVKGRFTI |
| | | | | SRDNAKNSLYLQMNSLRAEDTAVYYCARDEYNSGW |
| | | | | YVLFDYWGQGTLVTVSSASTKGPEVQLVESGGGLV |
| | | | | QPGGSLRLSCAASGYTFTNYGMNWVRQAPGKGLEW |
| | | | | VGWINTYTGEPTYAADFKRRFTFSLDTSKSTAYLQ |
| | | | | MNSLRAEDTAVYYCAKYPHYYGSSHWYFDVWGQGT |
| | | | | LVTVSS |
| 269 | DVD653L | AB012VL | AB014VL | DIQMTQSPSSVSASVGDRVTITCRASQGISSWLAW |
| | | | | YQQKPGKAPNLLIYEASSLQSGVPSRFGGSGSGTD |
| | | | | FTLTISSLQPEDFATYYCQQANGFPWTFGQGTKVE |
| | | | | IKRTVAAPSVFIFPPDIQMTQSPSSLSASVGDRVT |
| | | | | ITCSASQDISNYLNWYQQKPGKAPKVLIYFTSSLH |
| | | | | SGVPSRFSGSGSGTDFTLTISSLQPEDFATYYCQQ |
| | | | | YSTVPWTFGQGTKVEIKR |
| 270 | DVD654H | AB014VH | AB012VH | EVQLVESGGGLVQPGGSLRLSCAASGYTFTNYGMN |
| | | | | WVRQAPGKGLEWVGWINTYTGEPTYAADFKRRFTF |
| | | | | SLDTSKSTAYLQMNSLRAEDTAVYYCAKYPHYYGS |
| | | | | SHWYFDVWGQGTLVTVSSASTKGPQVQLVESGGGL |
| | | | | VKPGGSLRLSCAASGFTFSDYYMSWIRQAPGKGLE |
| | | | | WVSYISSSGSTIYYADSVKGRFTISRDNAKNSLYL |
| | | | | QMNSLRAEDTAVYYCARDEYNSGWYVLFDYWGQGT |
| | | | | LVTVSS |
| 271 | DVD654L | AB014VL | AB012VL | DIQMTQSPSSLSASVGDRVTITCSASQDISNYLNW |
| | | | | YQQKPGKAPKVLIYFTSSLHSGVPSRFSGSGSGTD |
| | | | | FTLTISSLQPEDFATYYCQQYSTVPWTFGQGTKVE |
| | | | | IKRTVAAPSVFIFPPDIQMTQSPSSVSASVGDRVT |
| | | | | ITCRASQGISSWLAWYQQKPGKAPNLLIYEASSLQ |
| | | | | SGVPSRFGGSGSGTDFTLTISSLQPEDFATYYCQQ |
| | | | | ANGFPWTFGQGTKVEIKR |

### Example 2.41

### Generation of VEGF (Seq. 1) and RON (Seq. 1) DVD-Igs

TABLE 94

| | DVD | Outer | Inner | |
|---|---|---|---|---|
| SEQ | Variable | Variable | Variable | |
| ID | Domain | Domain | Domain | Sequence |
| NO | Name | Name | Name | 12345678901234567890123456789012345 |
| 272 | DVD047H | AB014VL | AB005VH | EVQLVESGGGLVQPGGSLRLSCAASGYTFTNYGMN |
| | | | | WVRQAPGKGLEWVGWINTYTGEPTYAADFKRRFTF |
| | | | | SLDTSKSTAYLQMNSLRAEDTAVYYCAKYPHYYGS |
| | | | | SHWYFDVWGQGTLVTVSSASTKGPEVQLVQSGGGL |
| | | | | VKPGGSLRLSCAASGFTFSSYAMHWVRQAPGKGLE |
| | | | | WVAVISYDGSNKYYADSVKGRFTISRDNSKNTLYL |
| | | | | QMNSLRAEDTAVYYCARFSGWPNNYYYYGMDVWGQ |
| | | | | GTTVTVSS |
| 273 | DVD047L | AB014VH | AB005VL | DIQMTQSPSSLSASVGDRVTITCSASQDISNYLNW |
| | | | | YQQKPGKAPKVLIYFTSSLHSGVPSRFSGSGSGTD |
| | | | | FTLTISSLQPEDFATYYCQQYSTVPWTFGQGTKVE |
| | | | | IKRTVAAPDVVMTQSPLSLPVTPGEPASISCRSSQ |
| | | | | SLLHSNGFNYVDWYLQKPGQSPHLLIYFGSYRASG |
| | | | | VPDRFSGSGSGTDFTLKISRVEAEDVGVYYCMQAL |
| | | | | QTPPWTFGQGTKVEIRR |
| 274 | DVD048H | AB005VH | AB014VL | EVQLVQSGGGLVKPGGSLRLSCAASGFTFSSYAMH |
| | | | | WVRQAPGKGLEWVAVISYDGSNKYYADSVKGRFTI |
| | | | | SRDNSKNTLYLQMNSLRAEDTAVYYCARFSGWPNN |
| | | | | YYYYGMDVWGQGTTVTVSSASTKGPEVQLVESGGG |
| | | | | LVQPGGSLRLSCAASGYTFTNYGMNWVRQAPGKGL |
| | | | | EWVGWINTYTGEPTYAADFKRRFTFSLDTSKSTAY |
| | | | | LQMNSLRAEDTAVYYCAKYPHYYGSSHWYFDVWGQ |
| | | | | GTLVTVSS |
| 275 | DVD048L | AB005VL | AB014VH | DVVMTQSPLSLPVTPGEPASISCRSSQSLLHSNGF |
| | | | | NYVDWYLQKPGQSPHLLIYFGSYRASGVPDRFSGS |
| | | | | GSGTDFTLKISRVEAEDVGVYYCMQALQTPPWTFG |
| | | | | QGTKVEIRRTVAAPDIQMTQSPSSLSASVGDRVTI |
| | | | | TCSASQDISNYLNWYQQKPGKAPKVLIYFTSSLHS |
| | | | | GVPSRFSGSGSGTDFTLTISSLQPEDFATYYCQQY |
| | | | | STVPWTFGQGTKVEIKR |

### Example 2.42

### Generation of VEGF (Seq. 1) and NRP1 (Seq. 1) DVD-Igs

TABLE 95

| | DVD | Outer | Inner | |
|---|---|---|---|---|
| SEQ | Variable | Variable | Variable | |
| ID | Domain | Domain | Domain | Sequence |
| NO | Name | Name | Name | 12345678901234567890123456789012345 |
| 276 | DVD049H | AB014VH | AB016VH | EVQLVESGGGLVQPGGSLRLSCAASGYTFTNYGMN |
| | | | | WVRQAPGKGLEWVGWINTYTGEPTYAADFKRRFTF |
| | | | | SLDTSKSTAYLQMNSLRAEDTAVYYCAKYPHYYGS |
| | | | | SHWYFDVWGQGTLVTVSSASTKGPEVQLVESGGGL |
| | | | | VQPGGSLRLSCAASGFSFSSEPISWVRQAPGKGLE |
| | | | | WVSSITGKNGYTYYADSVKGRFTISADTSKNTAYL |
| | | | | QMNSLRAEDTAVYYCARWGKKVYGMDVWGQGTLVT |
| | | | | VSS |
| 277 | DVD049L | AB014VL | AB016VL | DIQMTQSPSSLSASVGDRVTITCSASQDISNYLNW |
| | | | | YQQKPGKAPKVLIYFTSSLHSGVPSRFSGSGSGTD |
| | | | | FTLTISSLQPEDFATYYCQQYSTVPWTFGQGTKVE |
| | | | | IKRTVAAPDIQMTQSPSSLSASVGDRVTITCRASQ |
| | | | | SISSYLAWYQQKPGKAPKLLIYGASSRASGVPSRF |
| | | | | SGSGSGTDFTLTISSLQPEDFATYYCQQYMSVPIT |
| | | | | FGQGTKVEIKR |
| 278 | DVD050H | AB016VH | AB014VH | EVQLVESGGGLVQPGGSLRLSCAASGFSFSSEPIS |
| | | | | WVRQAPGKGLEWVSSITGKNGYTYYADSVKGRFTI |
| | | | | SADTSKNTAYLQMNSLRAEDTAVYYCARWGKKVYG |
| | | | | MDVWGQGTLVTVSSASTKGPEVQLVESGGGLVQPG |
| | | | | GSLRLSCAASGYTFTNYGMNWVRQAPGKGLEWVGW |
| | | | | INTYTGEPTYAADFKRRFTFSLDTSKSTAYLQMNS |
| | | | | LRAEDTAVYYCAKYPHYYGSSHWYFDVWGQGTLVT |
| | | | | VSS |
| 279 | DVD050L | AB016VL | AB014VL | DIQMTQSPSSLSASVGDRVTITCRASQSISSYLAW |
| | | | | YQQKPGKAPKLLIYGASSRASGVPSRFSGSGSGTD |
| | | | | FTLTISSLQPEDFATYYCQQYMSVPITFGQGTKVE |
| | | | | IKRTVAAPDIQMTQSPSSLSASVGDRVTITCSASQ |
| | | | | DISNYLNWYQQKPGKAPKVLIYFTSSLHSGVPSRF |
| | | | | SGSGSGTDFTLTISSLQPEDFATYYCQQYSTVPWT |
| | | | | FGQGTKVEIKR |

### Example 2.43

### Generation of HGF (Seq. 1) and RON (Seq. 2) DVD-Igs

TABLE 96

| | DVD | Outer | Inner | |
|---|---|---|---|---|
| SEQ | Variable | Variable | Variable | |
| ID | Domain | Domain | Domain | Sequence |
| NO | Name | Name | Name | 12345678901234567890123456789012345 |
| 280 | DVD073H | AB034VH | AB012VH | QVQLQESGPGLVKPSEILSLTCTVSGGSISSHYWS |
| | | | | WVRQPPGKGLEWIGYIYYSGSTNYNPSLKSRVTIS |
| | | | | VDTSKNQFSLNLSSVTAADTAVYYCARIPNYYDRS |
| | | | | GYYPGYWYFDLWGRGTLVTVSSASTKGPQVQLVES |
| | | | | GGGLVKPGGSLRLSCAASGFTFSDYYMSWIRQAPG |
| | | | | KGLEWVSYISSSGSTIYYADSVKGRFTISRDNAKN |
| | | | | SLYLQMNSLRAEDTAVYYCARDEYNSGWYVLFDYW |
| | | | | GQGTLVTVSS |
| 281 | DVD073L | AB034VL | AB012VL | QAVLTQPSSLSAPPGASASLTCTLRSGFNVDSYRI |
| | | | | SWYQQKPGSPPQYLLRYKSDSDKQQGSGVPSRFSG |
| | | | | SKDASANAGILLISGLQSEDEADYYCMIWHSSAWV |
| | | | | FGGGTKLTVLRTVAAPDIQMTQSPSSVSASVGDRV |
| | | | | TITCRASQGISSWLAWYQQKPGKAPNLLIYEASSL |
| | | | | QSGVPSRFGGSGSGTDFTLTISSLQPEDFATYYCQ |
| | | | | QANGFPWTFGQGTKVEIKR |
| 282 | DVD074H | AB012VH | AB034VH | QVQLVESGGGLVKPGGSLRLSCAASGFTFSDYYMS |
| | | | | WIRQAPGKGLEWVSYISSSGSTIYYADSVKGRFTI |
| | | | | SRDNAKNSLYLQMNSLRAEDTAVYYCARDEYNSGW |
| | | | | YVLFDYWGQGTLVTVSSASTKGPQVQLQESGPGLV |
| | | | | KPSEILSLTCTVSGGSISSHYWSWVRQPPGKGLEW |
| | | | | IGYIYYSGSTNYNPSLKSRVTISVDTSKNQFSLNL |
| | | | | SSVTAADTAVYYCARIPNYYDRSGYYPGYWYFDLW |
| | | | | GRGTLVTVSS |
| 283 | DVD074L | AB012VL | AB034VL | DIQMTQSPSSVSASVGDRVTITCRASQGISSWLAW |
| | | | | YQQKPGKAPNLLIYEASSLQSGVPSRFGGSGSGTD |
| | | | | FTLTISSLQPEDFATYYCQQANGFPWTFGQGTKVE |
| | | | | IKRTVAAPQAVLTQPSSLSAPPGASASLTCTLRSG |
| | | | | FNVDSYRISWYQQKPGSPPQYLLRYKSDSDKQQGS |
| | | | | GVPSRFSGSKDASANAGILLISGLQSEDEADYYCM |
| | | | | IWHSSAWVFGGGTKLTVLR |

### Example 2.44

### Generation of EGFR (Seq. 2) and RON (Seq. 2) DVD-Igs

TABLE 97

| | DVD | Outer | Inner | |
|---|---|---|---|---|
| SEQ | Variable | Variable | Variable | |
| ID | Domain | Domain | Domain | Sequence |
| NO | Name | Name | Name | 12345678901234567890123456789012345 |
| 284 | DVD075H | AB034VH | AB033VH | QVQLQESGPGLVKPSEILSLTCTVSGGSISSHYWS |
| | | | | WVRQPPGKGLEWIGYIYYSGSTNYNPSLKSRVTIS |
| | | | | VDTSKNQFSLNLSSVTAADTAVYYCARIPNYYDRS |
| | | | | GYYPGYWYFDLWGRGTLVTVSSASTKGPQVQLKQS |
| | | | | GPGLVQPSQSLSITCTVSGFSLTNYGVHWVRQSPG |
| | | | | KGLEWLGVIWSGGNTDYNTPFTSRLSINKDNSKSQ |
| | | | | VFFKMNSLQSNDTAIYYCARALTYYDYEFAYWGQG |
| | | | | TLVTVSA |
| 285 | DVD075L | AB034VL | AB033VL | QAVLTQPSSLSAPPGASASLTCTLRSGFNVDSYRI |
| | | | | SWYQQKPGSPPQYLLRYKSDSDKQQGSGVPSRFSG |
| | | | | SKDASANAGILLISGLQSEDEADYYCMIWHSSAWV |
| | | | | FGGGTKLTVLRTVAAPDILLTQSPVILSVSPGERV |
| | | | | SFSCRASQSIGTNIHWYQQRTNGSPRLLIKYASES |
| | | | | ISGIPSRFSGSGSGTDFTLSINSVESEDIADYYCQ |
| | | | | QNNNWPTTFGAGTKLELKR |
| 286 | DVD076H | AB033VH | AB034VH | QVQLKQSGPGLVQPSQSLSITCTVSGFSLTNYGVH |
| | | | | WVRQSPGKGLEWLGVIWSGGNTDYNTPFTSRLSIN |
| | | | | KDNSKSQVFFKMNSLQSNDTAIYYCARALTYYDYE |
| | | | | FAYWGQGTLVTVSAASTKGPQVQLQESGPGLVKPS |
| | | | | EILSLTCTVSGGSISSHYWSWVRQPPGKGLEWIGY |
| | | | | IYYSGSTNYNPSLKSRVTISVDTSKNQFSLNLSSV |
| | | | | TAADTAVYYCARIPNYYDRSGYYPGYWYFDLWGRG |
| | | | | TLVTVSS |
| 287 | DVD076L | AB033VL | AB034VL | DILLTQSPVILSVSPGERVSFSCRASQSIGTNIHW |
| | | | | YQQRTNGSPRLLIKYASESISGIPSRFSGSGSGTD |
| | | | | FTLSINSVESEDIADYYCQQNNNWPTTFGAGTKLE |
| | | | | LKRTVAAPQAVLTQPSSLSAPPGASASLTCTLRSG |
| | | | | FNVDSYRISWYQQKPGSPPQYLLRYKSDSDKQQGS |
| | | | | GVPSRFSGSKDASANAGILLISGLQSEDEADYYCM |
| | | | | IWHSSAWVFGGGTKLTVLR |

### Example 2.45

### Generation of VEGF (Seq. 1) and RON (Seq. 2) DVD-Igs

TABLE 98

| | DVD | Outer | Inner | |
|---|---|---|---|---|
| SEQ | Variable | Variable | Variable | |
| ID | Domain | Domain | Domain | Sequence |
| NO | Name | Name | Name | 12345678901234567890123456789012345 |
| 288 | DVD077H | AB034VH | AB014VH | QVQLQESGPGLVKPSEILSLTCTVSGGSISSHYWS |
| | | | | WVRQPPGKGLEWIGYIYYSGSTNYNPSLKSRVTIS |
| | | | | VDTSKNQFSLNLSSVTAADTAVYYCARIPNYYDRS |
| | | | | GYYPGYWYFDLWGRGTLVTVSSASTKGPEVQLVES |
| | | | | GGGLVQPGGSLRLSCAASGYTFTNYGMNWVRQAPG |
| | | | | KGLEWVGWINTYTGEPTYAADFKRRFTFSLDTSKS |
| | | | | TAYLQMNSLRAEDTAVYYCAKYPHYYGSSHWYFDV |
| | | | | WGQGTLVTVSS |
| 289 | DVD077L | AB034VL | AB014VL | QAVLTQPSSLSAPPGASASLTCTLRSGFNVDSYRI |
| | | | | SWYQQKPGSPPQYLLRYKSDSDKQQGSGVPSRFSG |
| | | | | SKDASANAGILLISGLQSEDEADYYCMIWHSSAWV |
| | | | | FGGGTKLTVLRTVAAPDIQMTQSPSSLSASVGDRV |
| | | | | TITCSASQDISNYLNWYQQKPGKAPKVLIYFTSSL |
| | | | | HSGVPSRFSGSGSGTDFTLTISSLQPEDFATYYCQ |
| | | | | QYSTVPWTFGQGTKVEIKR |
| 290 | DVD078H | AB014VH | AB034VH | EVQLVESGGGLVQPGGSLRLSCAASGYTFTNYGMN |
| | | | | WVRQAPGKGLEWVGWINTYTGEPTYAADFKRRFTF |
| | | | | SLDTSKSTAYLQMNSLRAEDTAVYYCAKYPHYYGS |
| | | | | SHWYFDVWGQGTLVTVSSASTKGPQVQLQESGPGL |
| | | | | VKPSEILSLTCTVSGGSISSHYWSWVRQPPGKGLE |
| | | | | WIGYIYYSGSTNYNPSLKSRVTISVDTSKNQFSLN |
| | | | | LSSVTAADTAVYYCARIPNYYDRSGYYPGYWYFDL |
| | | | | WGRGTLVTVSS |
| 291 | DVD078L | AB014VL | AB034VL | DIQMTQSPSSLSASVGDRVTITCSASQDISNYLNW |
| | | | | YQQKPGKAPKVLIYFTSSLHSGVPSRFSGSGSGTD |
| | | | | FTLTISSLQPEDFATYYCQQYSTVPWTFGQGTKVE |
| | | | | IKRTVAAPQAVLTQPSSLSAPPGASASLTCTLRSG |
| | | | | FNVDSYRISWYQQKPGSPPQYLLRYKSDSDKQQGS |
| | | | | GVPSRFSGSKDASANAGILLISGLQSEDEADYYCM |
| | | | | IWHSSAWVFGGGTKLTVLR |

### Example 2.46

### Generation of EGFR (Seq. 1) and HER-2 (Seq. 1) DVD-Igs

TABLE 99

| | DVD | Outer | Inner | |
|---|---|---|---|---|
| SEQ | Variable | Variable | Variable | |
| ID | Domain | Domain | Domain | Sequence |
| NO | Name | Name | Name | 12345678901234567890123456789012345 |
| 292 | DVD079H | AB003VH | AB004VH | QVQLQESGPGLVKPSETLSLTCTVSGGSVSSGDYY |
| | | | | WTWIRQSPGKGLEWIGHIYYSGNTNYNPSLKSRLT |
| | | | | ISIDTSKTQFSLKLSSVTAADTAIYYCVRDRVTGA |
| | | | | FDIWGQGTMVTVSSASTKGPEVQLVESGGGLVQPG |
| | | | | GSLRLSCAASGFNIKDTYIHWVRQAPGKGLEWVAR |
| | | | | IYPTNGYTRYADSVKGRFTISADTSKNTAYLQMNS |
| | | | | LRAEDTAVYYCSRWGGDGFYAMDYWGQGTLVTVSS |
| 293 | DVD079L | AB003VL | AB004VL | DIQMTQSPSSLSASVGDRVTITCQASQDISNYLNW |
| | | | | YQQKPGKAPKLLIYDASNLETGVPSRFSGSGSGTD |
| | | | | FTFTISSLQPEDIATYFCQHFDHLPLAFGGGTKVE |
| | | | | IKRTVAAPDIQMTQSPSSLSASVGDRVTITCRASQ |
| | | | | DVNTAVAWYQQKPGKAPKLLIYSASFLYSGVPSRF |
| | | | | SGSRSGTDFTLTISSLQPEDFATYYCQQHYTTPPT |
| | | | | FGQGTKVEIKR |
| 294 | DVD080H | AB004VH | AB003VH | EVQLVESGGGLVQPGGSLRLSCAASGFNIKDTYIH |
| | | | | WVRQAPGKGLEWVARIYPTNGYTRYADSVKGRFTI |
| | | | | SADTSKNTAYLQMNSLRAEDTAVYYCSRWGGDGFY |
| | | | | AMDYWGQGTLVTVSSASTKGPQVQLQESGPGLVKP |
| | | | | SETLSLTCTVSGGSVSSGDYYWTWIRQSPGKGLEW |
| | | | | IGHIYYSGNTNYNPSLKSRLTISIDTSKTQFSLKL |
| | | | | SSVTAADTAIYYCVRDRVTGAFDIWGQGTMVTVSS |
| 295 | DVD080L | AB004VL | AB003VL | DIQMTQSPSSLSASVGDRVTITCRASQDVNTAVAW |
| | | | | YQQKPGKAPKLLIYSASFLYSGVPSRFSGSRSGTD |
| | | | | FTLTISSLQPEDFATYYCQQHYTTPPTFGQGTKVE |
| | | | | IKRTVAAPDIQMTQSPSSLSASVGDRVTITCQASQ |
| | | | | DISNYLNWYQQKPGKAPKLLIYDASNLETGVPSRF |
| | | | | SGSGSGTDFTFTISSLQPEDIATYFCQHFDHLPLA |
| | | | | FGGGTKVEIKR |

### Example 2.47

### Generation of EGFR (Seq. 1) and CD3 (Seq. 1) DVD-Igs

TABLE 100

| | DVD | Outer | Inner | |
|---|---|---|---|---|
| SEQ | Variable | Variable | Variable | |
| ID | Domain | Domain | Domain | Sequence |
| NO | Name | Name | Name | 12345678901234567890123456789012345 |
| 296 | DVD081H | AB003VH | AB002VH | QVQLQESGPGLVKPSETLSLTCTVSGGSVSSGDYY |
| | | | | WTWIRQSPGKGLEWIGHIYYSGNTNYNPSLKSRLT |
| | | | | ISIDTSKTQFSLKLSSVTAADTAIYYCVRDRVTGA |
| | | | | FDIWGQGTMVTVSSASTKGPQVQLQQSGAELARPG |
| | | | | ASVKMSCKASGYTFTRYTMHWVKQRPGQGLEWIGY |
| | | | | INPSRGYTNYNQKFKDKATLTTDKSSSTAYMQLSS |
| | | | | LTSEDSAVYYCARYYDDHYCLDYWGQGTTLTVSS |
| 297 | DVD081L | AB003VL | AB002VL | DIQMTQSPSSLSASVGDRVTITCQASQDISNYLNW |
| | | | | YQQKPGKAPKLLIYDASNLETGVPSRFSGSGSGTD |
| | | | | FTFTISSLQPEDIATYFCQHFDHLPLAFGGGTKVE |
| | | | | IKRTVAAPQIVLTQSPAIMSASPGEKVTMTCRASS |
| | | | | SVSYMNWYQQKSGTSPKRWIYDTSKVASGVPYRFS |
| | | | | GSGSGTSYSLTISSMEAEDAATYYCQQWSSNPLTF |
| | | | | GSGTKLEINR |
| 298 | DVD082H | AB002VH | AB003VH | QVQLQQSGAELARPGASVKMSCKASGYTFTRYTMH |
| | | | | WVKQRPGQGLEWIGYINPSRGYTNYNQKFKDKATL |
| | | | | TTDKSSSTAYMQLSSLTSEDSAVYYCARYYDDHYC |
| | | | | LDYWGQGTTLTVSSASTKGPQVQLQESGPGLVKPS |
| | | | | ETLSLTCTVSGGSVSSGDYYWTWIRQSPGKGLEWI |
| | | | | GHIYYSGNTNYNPSLKSRLTISIDTSKTQFSLKLS |
| | | | | SVTAADTAIYYCVRDRVTGAFDIWGQGTMVTVSS |
| 299 | DVD082L | AB002VL | AB003VL | QIVLTQSPAIMSASPGEKVTMTCRASSSVSYMNWY |
| | | | | QQKSGTSPKRWIYDTSKVASGVPYRFSGSGSGTSY |
| | | | | SLTISSMEAEDAATYYCQQWSSNPLTFGSGTKLEI |
| | | | | NRTVAAPDIQMTQSPSSLSASVGDRVTITCQASQD |
| | | | | ISNYLNWYQQKPGKAPKLLIYDASNLETGVPSRFS |
| | | | | GSGSGTDFTFTISSLQPEDIATYFCQHFDHLPLAF |
| | | | | GGGTKVEIKR |

### Example 2.48

### Generation of EGFR (Seq. 1) and IGF1R DVD-Igs

TABLE 101

| | DVD | Outer | Inner | |
|---|---|---|---|---|
| SEQ | Variable | Variable | Variable | |
| ID | Domain | Domain | Domain | Sequence |
| NO | Name | Name | Name | 12345678901234567890123456789012345 |
| 300 | DVD083H | AB003VH | AB011VH | QVQLQESGPGLVKPSETLSLTCTVSGGSVSSGDYY |
| | | | | WTWIRQSPGKGLEWIGHIYYSGNTNYNPSLKSRLT |
| | | | | ISIDTSKTQFSLKLSSVTAADTAIYYCVRDRVTGA |
| | | | | FDIWGQGTMVTVSSASTKGPEVQLLESGGGLVQPG |
| | | | | GSLRLSCTASGFTFSSYAMNWVRQAPGKGLEWVSA |
| | | | | ISGSGGTTFYADSVKGRFTISRDNSRTTLYLQMNS |
| | | | | LRAEDTAVYYCAKDLGWSDSYYYYYGMDVWGQGTT |
| | | | | VTVSS |
| 301 | DVD083L | AB003VL | AB011VL | DIQMTQSPSSLSASVGDRVTITCQASQDISNYLNW |
| | | | | YQQKPGKAPKLLIYDASNLETGVPSRFSGSGSGTD |
| | | | | FTFTISSLQPEDIATYFCQHFDHLPLAFGGGTKVE |
| | | | | IKRTVAAPDIQMTQFPSSLSASVGDRVTITCRASQ |
| | | | | GIRNDLGWYQQKPGKAPKRLIYAASRLHRGVPSRF |
| | | | | SGSGSGTEFTLTISSLQPEDFATYYCLQHNSYPCS |
| | | | | FGQGTKLEIKR |
| 302 | DVD084H | AB011VH | AB003VH | EVQLLESGGGLVQPGGSLRLSCTASGFTFSSYAMN |
| | | | | WVRQAPGKGLEWVSAISGSGGTTFYADSVKGRFTI |
| | | | | SRDNSRTTLYLQMNSLRAEDTAVYYCAKDLGWSDS |
| | | | | YYYYYGMDVWGQGTTVTVSSASTKGPQVQLQESGP |
| | | | | GLVKPSETLSLTCTVSGGSVSSGDYYWTWIRQSPG |
| | | | | KGLEWIGHIYYSGNTNYNPSLKSRLTISIDTSKTQ |
| | | | | FSLKLSSVTAADTAIYYCVRDRVTGAFDIWGQGTM |
| | | | | VTVSS |
| 303 | DVD084L | AB011VL | AB003VL | DIQMTQFPSSLSASVGDRVTITCRASQGIRNDLGW |
| | | | | YQQKPGKAPKRLIYAASRLHRGVPSRFSGSGSGTE |
| | | | | FTLTISSLQPEDFATYYCLQHNSYPCSFGQGTKLE |
| | | | | IKRTVAAPDIQMTQSPSSLSASVGDRVTITCQASQ |
| | | | | DISNYLNWYQQKPGKAPKLLIYDASNLETGVPSRF |
| | | | | SGSGSGTDFTFTISSLQPEDIATYFCQHFDHLPLA |
| | | | | FGGGTKVEIKR |

### Example 2.49

### Generation of EGFR (Seq. 1) and RON (Seq. 1) DVD-Igs

TABLE 102

| | DVD | Outer | Inner | |
|---|---|---|---|---|
| SEQ | Variable | Variable | Variable | |
| ID | Domain | Domain | Domain | Sequence |
| NO | Name | Name | Name | 12345678901234567890123456789012345 |
| 304 | DVD085H | AB003VH | AB005VH | QVQLQESGPGLVKPSETLSLTCTVSGGSVSSGDYY |
| | | | | WTWIRQSPGKGLEWIGHIYYSGNTNYNPSLKSRLT |
| | | | | ISIDTSKTQFSLKLSSVTAADTAIYYCVRDRVTGA |
| | | | | FDIWGQGTMVTVSSASTKGPEVQLVQSGGGLVKPG |
| | | | | GSLRLSCAASGFTFSSYAMHWVRQAPGKGLEWVAV |
| | | | | ISYDGSNKYYADSVKGRFTISRDNSKNTLYLQMNS |
| | | | | LRAEDTAVYYCARFSGWPNNYYYYGMDVWGQGTTV |
| | | | | TVSS |
| 305 | DVD085L | AB003VL | AB005VL | DIQMTQSPSSLSASVGDRVTITCQASQDISNYLNW |
| | | | | YQQKPGKAPKLLIYDASNLETGVPSRFSGSGSGTD |
| | | | | FTFTISSLQPEDIATYFCQHFDHLPLAFGGGTKVE |
| | | | | IKRTVAAPDVVMTQSPLSLPVTPGEPASISCRSSQ |
| | | | | SLLHSNGFNYVDWYLQKPGQSPHLLIYFGSYRASG |
| | | | | VPDRFSGSGSGTDFTLKISRVEAEDVGVYYCMQAL |
| | | | | QTPPWTFGQGTKVEIRR |
| 306 | DVD086H | AB005VH | AB003VH | EVQLVQSGGGLVKPGGSLRLSCAASGFTFSSYAMH |
| | | | | WVRQAPGKGLEWVAVISYDGSNKYYADSVKGRFTI |
| | | | | SRDNSKNTLYLQMNSLRAEDTAVYYCARFSGWPNN |
| | | | | YYYYGMDVWGQGTTVTVSSASTKGPQVQLQESGPG |
| | | | | LVKPSETLSLTCTVSGGSVSSGDYYWTWIRQSPGK |
| | | | | GLEWIGHIYYSGNTNYNPSLKSRLTISIDTSKTQF |
| | | | | SLKLSSVTAADTAIYYCVRDRVTGAFDIWGQGTMV |
| | | | | TVSS |
| 307 | DVD086L | AB005VL | AB003VL | DVVMTQSPLSLPVTPGEPASISCRSSQSLLHSNGF |
| | | | | NYVDWYLQKPGQSPHLLIYFGSYRASGVPDRFSGS |
| | | | | GSGTDFTLKISRVEAEDVGVYYCMQALQTPPWTFG |
| | | | | QGTKVEIRRTVAAPDIQMTQSPSSLSASVGDRVTI |
| | | | | TCQASQDISNYLNWYQQKPGKAPKLLIYDASNLET |
| | | | | GVPSRFSGSGSGTDFTFTISSLQPEDIATYFCQHF |
| | | | | DHLPLAFGGGTKVEIKR |

### Example 2.50

### Generation of EGFR (Seq. 1) and RON (Seq. 2) DVD-Igs

TABLE 103

| | DVD | Outer | Inner | |
|---|---|---|---|---|
| SEQ | Variable | Variable | Variable | |
| ID | Domain | Domain | Domain | Sequence |
| NO | Name | Name | Name | 12345678901234567890123456789012345 |
| 308 | DVD087H | AB003VH | AB034VH | QVQLQESGPGLVKPSETLSLTCTVSGGSVSSGDYY |
| | | | | WTWIRQSPGKGLEWIGHIYYSGNTNYNPSLKSRLT |
| | | | | ISIDTSKTQFSLKLSSVTAADTAIYYCVRDRVTGA |
| | | | | FDIWGQGTMVTVSSASTKGPQVQLQESGPGLVKPS |
| | | | | EILSLTCTVSGGSISSHYWSWVRQPPGKGLEWIGY |
| | | | | IYYSGSTNYNPSLKSRVTISVDTSKNQFSLNLSSV |
| | | | | TAADTAVYYCARIPNYYDRSGYYPGYWYFDLWGRG |
| | | | | TLVTVSS |
| 309 | DVD087L | AB003VL | AB034VL | DIQMTQSPSSLSASVGDRVTITCQASQDISNYLNW |
| | | | | YQQKPGKAPKLLIYDASNLETGVPSRFSGSGSGTD |
| | | | | FTFTISSLQPEDIATYFCQHFDHLPLAFGGGTKVE |
| | | | | IKRTVAAPQAVLTQPSSLSAPPGASASLTCTLRSG |
| | | | | FNVDSYRISWYQQKPGSPPQYLLRYKSDSDKQQGS |
| | | | | GVPSRFSGSKDASANAGILLISGLQSEDEADYYCM |
| | | | | IWHSSAWVFGGGTKLTVLR |
| 310 | DVD088H | AB034VH | AB003VH | QVQLQESGPGLVKPSEILSLTCTVSGGSISSHYWS |
| | | | | WVRQPPGKGLEWIGYIYYSGSTNYNPSLKSRVTIS |
| | | | | VDTSKNQFSLNLSSVTAADTAVYYCARIPNYYDRS |
| | | | | GYYPGYWYFDLWGRGTLVTVSSASTKGPQVQLQES |
| | | | | GPGLVKPSETLSLTCTVSGGSVSSGDYYWTWIRQS |
| | | | | PGKGLEWIGHIYYSGNTNYNPSLKSRLTISIDTSK |
| | | | | TQFSLKLSSVTAADTAIYYCVRDRVTGAFDIWGQG |
| | | | | TMVTVSS |
| 311 | DVD088L | AB034VL | AB003VL | QAVLTQPSSLSAPPGASASLTCTLRSGFNVDSYRI |
| | | | | SWYQQKPGSPPQYLLRYKSDSDKQQGSGVPSRFSG |
| | | | | SKDASANAGILLISGLQSEDEADYYCMIWHSSAWV |
| | | | | FGGGTKLTVLRTVAAPDIQMTQSPSSLSASVGDRV |
| | | | | TITCQASQDISNYLNWYQQKPGKAPKLLIYDASNL |
| | | | | ETGVPSRFSGSGSGTDFTFTISSLQPEDIATYFCQ |
| | | | | HFDHLPLAFGGGTKVEIKR |

### Example 2.51

### Generation of EGFR (Seq. 1) and HGF (Seq. 1) DVD-Igs

TABLE 104

| | DVD | Outer | Inner | |
|---|---|---|---|---|
| SEQ | Variable | Variable | Variable | |
| ID | Domain | Domain | Domain | Sequence |
| NO | Name | Name | Name | 12345678901234567890123456789012345 |
| 312 | DVD089H | AB003VH | AB012VH | QVQLQESGPGLVKPSETLSLTCTVSGGSVSSGDYY |
| | | | | WTWIRQSPGKGLEWIGHIYYSGNTNYNPSLKSRLT |
| | | | | ISIDTSKTQFSLKLSSVTAADTAIYYCVRDRVTGA |
| | | | | FDIWGQGTMVTVSSASTKGPQVQLVESGGGLVKPG |
| | | | | GSLRLSCAASGFTFSDYYMSWIRQAPGKGLEWVSY |
| | | | | ISSSGSTIYYADSVKGRFTISRDNAKNSLYLQMNS |
| | | | | LRAEDTAVYYCARDEYNSGWYVLFDYWGQGTLVTV |
| | | | | SS |
| 313 | DVD089L | AB003VL | AB012VL | DIQMTQSPSSLSASVGDRVTITCQASQDISNYLNW |
| | | | | YQQKPGKAPKLLIYDASNLETGVPSRFSGSGSGTD |
| | | | | FTFTISSLQPEDIATYFCQHFDHLPLAFGGGTKVE |
| | | | | IKRTVAAPDIQMTQSPSSVSASVGDRVTITCRASQ |
| | | | | GISSWLAWYQQKPGKAPNLLIYEASSLQSGVPSRF |
| | | | | GGSGSGTDFTLTISSLQPEDFATYYCQQANGFPWT |
| | | | | FGQGTKVEIKR |
| 314 | DVD090H | AB012VH | AB003VH | QVQLVESGGGLVKPGGSLRLSCAASGFTFSDYYMS |
| | | | | WIRQAPGKGLEWVSYISSSGSTIYYADSVKGRFTI |
| | | | | SRDNAKNSLYLQMNSLRAEDTAVYYCARDEYNSGW |
| | | | | YVLFDYWGQGTLVTVSSASTKGPQVQLQESGPGLV |
| | | | | KPSETLSLTCTVSGGSVSSGDYYWTWIRQSPGKGL |
| | | | | EWIGHIYYSGNTNYNPSLKSRLTISIDTSKTQFSL |
| | | | | KLSSVTAADTAIYYCVRDRVTGAFDIWGQGTMVTV |
| | | | | SS |
| 315 | DVD090L | AB012VL | AB003VL | DIQMTQSPSSVSASVGDRVTITCRASQGISSWLAW |
| | | | | YQQKPGKAPNLLIYEASSLQSGVPSRFGGSGSGTD |
| | | | | FTLTISSLQPEDFATYYCQQANGFPWTFGQGTKVE |
| | | | | IKRTVAAPDIQMTQSPSSLSASVGDRVTITCQASQ |
| | | | | DISNYLNWYQQKPGKAPKLLIYDASNLETGVPSRF |
| | | | | SGSGSGTDFTFTISSLQPEDIATYFCQHFDHLPLA |
| | | | | FGGGTKVEIKR |

### Example 2.52

### Generation of EGFR (Seq. 1) and c-MET DVD-Igs

TABLE 105

| | DVD | Outer | Inner | |
|---|---|---|---|---|
| SEQ | Variable | Variable | Variable | |
| ID | Domain | Domain | Domain | Sequence |
| NO | Name | Name | Name | 12345678901234567890123456789012345 |
| 316 | DVD091H | AB003VH | AB013VH | QVQLQESGPGLVKPSETLSLTCTVSGGSVSSGDYY |
| | | | | WTWIRQSPGKGLEWIGHIYYSGNTNYNPSLKSRLT |
| | | | | ISIDTSKTQFSLKLSSVTAADTAIYYCVRDRVTGA |
| | | | | FDIWGQGTMVTVSSASTKGPQVQLQQSGPELVRPG |
| | | | | ASVKWSCPASGYTFTSYWLHWVKKQRPGQGLEWIG |
| | | | | MIDPSNSDTRFNPPNFKDKATLNVDRSSNTAYNLL |
| | | | | SSLTSADSAVYYCATYGSYVSPLDYWGQGTSVYVSS |
| 317 | DVD091L | AB003VL | AB013VL | DIQMTQSPSSLSASVGDRVTITCQASQDISNYLNW |
| | | | | YQQKPGKAPKLLIYDASNLETGVPSRFSGSGSGTD |
| | | | | FTFTISSLQPEDIATYFCQHFDHLPLAFGGGTKVE |
| | | | | IKRTVAAPDIMMSQSPSSLTVSVGEKVTVSCKSSQ |
| | | | | SLLVTSSQKNYLAWYQQKPQQSPKLLIYWASTRES |
| | | | | GVPDRFTGSGSGTDFTLTITSVKADDLAVYYCQQY |
| | | | | YAYPWTFGDGTKLEIKR |
| 318 | DVD092H | AB013VH | AB003VH | QVQLQQSGPELVRPGASVKWSCPASGYTFTSYWLH |
| | | | | WVKKQRPGQGLEWIGMIDPSNSDTRFNPPNFKDKA |
| | | | | TLNVDRSSNTAYNLLSSLTSADSAVYYCATYGSYV |
| | | | | SPLDYWGQGTSVYVSSASTKGPQVQLQESGPGLVK |
| | | | | PSETLSLTCTVSGGSVSSGDYYWTWIRQSPGKGLE |
| | | | | WIGHIYYSGNTNYNPSLKSRLTISIDTSKTQFSLK |
| | | | | LSSVTAADTAIYYCVRDRVTGAFDIWGQGTMVTVSS |
| 319 | DVD092L | AB013VL | AB003VL | DIMMSQSPSSLTVSVGEKVTVSCKSSQSLLVTSSQ |
| | | | | KNYLAWYQQKPQQSPKLLIYWASTRESGVPDRFTG |
| | | | | SGSGTDFTLTITSVKADDLAVYYCQQYYAYPWTFG |
| | | | | DGTKLEIKRTVAAPDIQMTQSPSSLSASVGDRVTI |
| | | | | TCQASQDISNYLNWYQQKPGKAPKLLIYDASNLET |
| | | | | GVPSRFSGSGSGTDFTFTISSLQPEDIATYFCQHF |
| | | | | DHLPLAFGGGTKVEIKR |

### Example 2.53

### Generation of EGFR (Seq. 1) and VEGF (Seq. 1) DVD-Igs

TABLE 106

| | DVD | Outer | Inner | |
|---|---|---|---|---|
| SEQ | Variable | Variable | Variable | |
| ID | Domain | Domain | Domain | Sequence |
| NO | Name | Name | Name | 12345678901234567890123456789012345 |
| 320 | DVD093H | AB003VH | AB014VH | QVQLQESGPGLVKPSETLSLTCTVSGGSVSSGDYY |
| | | | | WTWIRQSPGKGLEWIGHIYYSGNTNYNPSLKSRLT |
| | | | | ISIDTSKTQFSLKLSSVTAADTAIYYCVRDRVTGA |
| | | | | FDIWGQGTMVTVSSASTKGPEVQLVESGGGLVQPG |
| | | | | GSLRLSCAASGYTFTNYGMNWVRQAPGKGLEWVGW |
| | | | | INTYTGEPTYAADFKRRFTFSLDTSKSTAYLQMNS |
| | | | | LRAEDTAVYYCAKYPHYYGSSHWYFDVWGQGTLVT |
| | | | | VSS |
| 321 | DVD093L | AB003VL | AB014VL | DIQMTQSPSSLSASVGDRVTITCQASQDISNYLNW |
| | | | | YQQKPGKAPKLLIYDASNLETGVPSRFSGSGSGTD |
| | | | | FTFTISSLQPEDIATYFCQHFDHLPLAFGGGTKVE |
| | | | | IKRTVAAPDIQMTQSPSSLSASVGDRVTITCSASQ |
| | | | | DISNYLNWYQQKPGKAPKVLIYFTSSLHSGVPSRF |
| | | | | SGSGSGTDFTLTISSLQPEDFATYYCQQYSTVPWT |
| | | | | FGQGTKVEIKR |
| 322 | DVD094H | AB014VH | AB003VH | EVQLVESGGGLVQPGGSLRLSCAASGYTFTNYGMN |
| | | | | WVRQAPGKGLEWVGWINTYTGEPTYAADFKRRFTF |
| | | | | SLDTSKSTAYLQMNSLRAEDTAVYYCAKYPHYYGS |
| | | | | SHWYFDVWGQGTLVTVSSASTKGPQVQLQESGPGL |
| | | | | VKPSETLSLTCTVSGGSVSSGDYYWTWIRQSPGKG |
| | | | | LEWIGHIYYSGNTNYNPSLKSRLTISIDTSKTQFS |
| | | | | LKLSSVTAADTAIYYCVRDRVTGAFDIWGQGTMVT |
| | | | | VSS |
| 323 | DVD094L | AB014VL | AB003VL | DIQMTQSPSSLSASVGDRVTITCSASQDISNYLNW |
| | | | | YQQKPGKAPKVLIYFTSSLHSGVPSRFSGSGSGTD |
| | | | | FTLTISSLQPEDFATYYCQQYSTVPWTFGQGTKVE |
| | | | | IKRTVAAPDIQMTQSPSSLSASVGDRVTITCQASQ |
| | | | | DISNYLNWYQQKPGKAPKLLIYDASNLETGVPSRF |
| | | | | SGSGSGTDFTFTISSLQPEDIATYFCQHFDHLPLA |
| | | | | FGGGTKVEIKR |

### Example 2.54

### Generation of NRP1 (Seq. 2) and VEGF (Seq. 1) DVD-Igs

TABLE 107

| | DVD | Outer | Inner | |
|---|---|---|---|---|
| SEQ | Variable | Variable | Variable | |
| ID | Domain | Domain | Domain | Sequence |
| NO | Name | Name | Name | 12345678901234567890123456789012345 |
| 324 | DVD107H | AB035VH | AB014VH | EVQLVESGGGLVQPGGSLRLSCAASGFTFSSYAMS |
| | | | | WVRQAPGKGLEWVSQISPAGGYTNYADSVKGRFTI |
| | | | | SADTSKNTAYLQMNSLRAEDTAVYYCARELPYYRM |
| | | | | SKVMDVQGQGTLVTVSSASTKGPEVQLVESGGGLV |
| | | | | QPGGSLRLSCAASGYTFTNYGMNWVRQAPGKGLEW |
| | | | | VGWINTYTGEPTYAADFKRRFTFSLDTSKSTAYLQ |
| | | | | MNSLRAEDTAVYYCAKYPHYYGSSHWYFDVWGQGT |
| | | | | LVTVSS |
| 325 | DVD107L | AB035VL | AB014VL | DIQMTQSPSSLSASVGDRVTITCRASQYFSSYLAW |
| | | | | YQQKPGKAPKLLIYGASSRASGVPSRFSGSGSGTD |
| | | | | FTLTISSLQPEDFATYYCQQYLGSPPTFGQGTKVE |
| | | | | IKRTVAAPDIQMTQSPSSLSASVGDRVTITCSASQ |
| | | | | DISNYLNWYQQKPGKAPKVLIYFTSSLHSGVPSRF |
| | | | | SGSGSGTDFTLTISSLQPEDFATYYCQQYSTVPWT |
| | | | | FGQGTKVEIKR |
| 326 | DVD108H | AB014VH | AB035VH | EVQLVESGGGLVQPGGSLRLSCAASGYTFTNYGMN |
| | | | | WVRQAPGKGLEWVGWINTYTGEPTYAADFKRRFTF |
| | | | | SLDTSKSTAYLQMNSLRAEDTAVYYCAKYPHYYGS |
| | | | | SHWYFDVWGQGTLVTVSSASTKGPEVQLVESGGGL |
| | | | | VQPGGSLRLSCAASGFTFSSYAMSWVRQAPGKGLE |
| | | | | WVSQISPAGGYTNYADSVKGRFTISADTSKNTAYL |
| | | | | QMNSLRAEDTAVYYCARELPYYRMSKVMDVQGQGT |
| | | | | LVTVSS |
| 327 | DVD108L | AB014VL | AB035VL | DIQMTQSPSSLSASVGDRVTITCSASQDISNYLNW |
| | | | | YQQKPGKAPKVLIYFTSSLHSGVPSRFSGSGSGTD |
| | | | | FTLTISSLQPEDFATYYCQQYSTVPWTFGQGTKVE |
| | | | | IKRTVAAPDIQMTQSPSSLSASVGDRVTITCRASQ |
| | | | | YFSSYLAWYQQKPGKAPKLLIYGASSRASGVPSRF |
| | | | | SGSGSGTDFTLTISSLQPEDFATYYCQQYLGSPPT |
| | | | | FGQGTKVEIKR |

### Example 2.55

### Generation of CD3 (Seq. 2) and CD-20 DVD-Igs

TABLE 108

| | DVD | Outer | Inner | |
|---|---|---|---|---|
| SEQ | Variable | Variable | Variable | |
| ID | Domain | Domain | Domain | Sequence |
| NO | Name | Name | Name | 12345678901234567890123456789012345 |
| 328 | DVD131H | AB039VH | AB001VH | QVQLQQSGAELARPGASVKMSCKASGYTFTRYTMH |
| | | | | WVKQRPGQGLEWIGYINPSRGYTNYNQKFKDKATL |
| | | | | TTDKSSSTAYMQLSSLTSEDSAVYYCARYYDDHYC |
| | | | | LDYWGQGTTLTVSSASTKGPQVQLQQPGAELVKPG |
| | | | | ASVKMSCKASGYTFTSYNMHWVKQTPGRGLEWIGA |
| | | | | IYPGNGDTSYNQKFKGKATLTADKSSSTAYMQLSS |
| | | | | LTSEDSAVYYCARSTYYGGDWYFNVWGAGTTVTVSA |
| 329 | DVD131L | AB039VL | AB001VL | QIVLTQSPAIMSASPGEKVTMTCSASSSVSYMNWY |
| | | | | QQKSGTSPKRWIYDTSKLASGVPAHFRGSGSGTSY |
| | | | | SLTISGMEAEDAATYYCQQWSSNPFTFGSGTKLEI |
| | | | | NRTVAAPQIVLSQSPAILSPSPGEKVTMTCRASSS |
| | | | | VSYIHWFQQKPGSSPKPWIYATSNLASGVPVRFSG |
| | | | | SGSGTSYSLTISRVEAEDAATYYCQQWTSNPPTFG |
| | | | | GGTKLEIKR |
| 330 | DVD132H | AB001VH | AB039VH | QVQLQQPGAELVKPGASVKMSCKASGYTFTSYNMH |
| | | | | WVKQTPGRGLEWIGAIYPGNGDTSYNQKFKGKATL |
| | | | | TADKSSSTAYMQLSSLTSEDSAVYYCARSTYYGGD |
| | | | | WYFNVWGAGTTVTVSAASTKGPQVQLQQSGAELAR |
| | | | | PGASVKMSCKASGYTFTRYTMHWVKQRPGQGLEWI |
| | | | | GYINPSRGYTNYNQKFKDKATLTTDKSSSTAYMQL |
| | | | | SSLTSEDSAVYYCARYYDDHYCLDYWGQGTTLTVSS |
| 331 | DVD132L | AB001VL | AB039VL | QIVLSQSPAILSPSPGEKVTMTCRASSSVSYIHWF |
| | | | | QQKPGSSPKPWIYATSNLASGVPVRFSGSGSGTSY |
| | | | | SLTISRVEAEDAATYYCQQWTSNPPTFGGGTKLEI |
| | | | | KRTVAAPQIVLTQSPAIMSASPGEKVTMTCSASSS |
| | | | | VSYMNWYQQKSGTSPKRWIYDTSKLASGVPAHFRG |
| | | | | SGSGTSYSLTISGMEAEDAATYYCQQWSSNPFTFG |
| | | | | SGTKLEINR |

### Example 2.56

### Generation of CD-3 (Seq. 2) and HER-2 (Seq. 1) DVD-Igs

TABLE 109

| | DVD | Outer | Inner | |
|---|---|---|---|---|
| SEQ | Variable | Variable | Variable | |
| ID | Domain | Domain | Domain | Sequence |
| NO | Name | Name | Name | 12345678901234567890123456789012345 |
| 332 | DVD135H | AB039VH | AB004VH | QVQLQQSGAELARPGASVKMSCKASGYTFTRYTMH |
| | | | | WVKQRPGQGLEWIGYINPSRGYTNYNQKFKDKATL |
| | | | | TTDKSSSTAYMQLSSLTSEDSAVYYCARYYDDHYC |
| | | | | LDYWGQGTTLTVSSASTKGPEVQLVESGGGLVQPG |
| | | | | GSLRLSCAASGFNIKDTYIHWVRQAPGKGLEWVAR |
| | | | | IYPTNGYTRYADSVKGRFTISADTSKNTAYLQMNS |
| | | | | LRAEDTAVYYCSRWGGDGFYAMDYWGQGTLVTVSS |
| 333 | DVD135L | AB039VL | AB004VL | QIVLTQSPAIMSASPGEKVTMTCSASSSVSYMNWY |
| | | | | QQKSGTSPKRWIYDTSKLASGVPAHFRGSGSGTSY |
| | | | | SLTISGMEAEDAATYYCQQWSSNPFTFGSGTKLEI |
| | | | | NRTVAAPDIQMTQSPSSLSASVGDRVTITCRASQD |
| | | | | VNTAVAWYQQKPGKAPKLLIYSASFLYSGVPSRFS |
| | | | | GSRSGTDFTLTISSLQPEDFATYYCQQHYTTPPTF |
| | | | | GQGTKVEIKR |
| 334 | DVD136H | AB004VH | AB039VH | EVQLVESGGGLVQPGGSLRLSCAASGFNIKDTYIH |
| | | | | WVRQAPGKGLEWVARIYPTNGYTRYADSVKGRFTI |
| | | | | SADTSKNTAYLQMNSLRAEDTAVYYCSRWGGDGFY |
| | | | | AMDYWGQGTLVTVSSASTKGPQVQLQQSGAELARP |
| | | | | GASVKMSCKASGYTFTRYTMHWVKQRPGQGLEWIG |
| | | | | YINPSRGYTNYNQKFKDKATLTTDKSSSTAYMQLS |
| | | | | SLTSEDSAVYYCARYYDDHYCLDYWGQGTTLTVSS |
| 335 | DVD136L | AB004VL | AB039VL | DIQMTQSPSSLSASVGDRVTITCRASQDVNTAVAW |
| | | | | YQQKPGKAPKLLIYSASFLYSGVPSRFSGSRSGTD |
| | | | | FTLTISSLQPEDFATYYCQQHYTTPPTFGQGTKVE |
| | | | | IKRTVAAPQIVLTQSPAIMSASPGEKVTMTCSASS |
| | | | | SVSYMNWYQQKSGTSPKRWIYDTSKLASGVPAHFR |
| | | | | GSGSGTSYSLTISGMEAEDAATYYCQQWSSNPFTF |
| | | | | GSGTKLEINR |

### Example 2.57

### Generation of CD-3 (Seq. 2) and CD-19 DVD-Igs

TABLE 110

| | DVD | Outer | Inner | |
|---|---|---|---|---|
| SEQ | Variable | Variable | Variable | |
| ID | Domain | Domain | Domain | Sequence |
| NO | Name | Name | Name | 12345678901234567890123456789012345 |
| 336 | DVD137H | AB039VH | AB006VH | QVQLQQSGAELARPGASVKMSCKASGYTFTRYTMH |
| | | | | WVKQRPGQGLEWIGYINPSRGYTNYNQKFKDKATL |
| | | | | TTDKSSSTAYMQLSSLTSEDSAVYYCARYYDDHYC |
| | | | | LDYWGQGTTLTVSSASTKGPQVQLQQSGAELVRPG |
| | | | | SSVKISCKASGYAFSSYWMNWVKQRPGQGLEWIGQ |
| | | | | IWPGDGDTNYNGKFKGKATLTADESSSTAYMQLSS |
| | | | | LASEDSAVYFCARRETTTVGRYYYAMDYWGQGTSV |
| | | | | TVSS |
| 337 | DVD137L | AB039VL | AB006VL | QIVLTQSPAIMSASPGEKVTMTCSASSSVSYMNWY |
| | | | | QQKSGTSPKRWIYDTSKLASGVPAHFRGSGSGTSY |
| | | | | SLTISGMEAEDAATYYCQQWSSNPFTFGSGTKLEI |
| | | | | NRTVAAPDILLTQTPASLAVSLGQRATISCKASQS |
| | | | | VDYDGDSYLNWYQQIPGQPPKLLIYDASNLVSGIP |
| | | | | PRFSGSGSGTDFTLNIHPVEKVDAATYHCQQSTED |
| | | | | PWTFGGGTKLEIKR |
| 338 | DVD138H | AB006VH | AB039VH | QVQLQQSGAELVRPGSSVKISCKASGYAFSSYWMN |
| | | | | WVKQRPGQGLEWIGQIWPGDGDTNYNGKFKGKATL |
| | | | | TADESSSTAYMQLSSLASEDSAVYFCARRETTTVG |
| | | | | RYYYAMDYWGQGTSVTVSSASTKGPQVQLQQSGAE |
| | | | | LARPGASVKMSCKASGYTFTRYTMHWVKQRPGQGL |
| | | | | EWIGYINPSRGYTNYNQKFKDKATLTTDKSSSTAY |
| | | | | MQLSSLTSEDSAVYYCARYYDDHYCLDYWGQGTTL |
| | | | | TVSS |
| 339 | DVD138L | AB006VL | AB039VL | DILLTQTPASLAVSLGQRATISCKASQSVDYDGDS |
| | | | | YLNWYQQIPGQPPKLLIYDASNLVSGIPPRFSGSG |
| | | | | SGTDFTLNIHPVEKVDAATYHCQQSTEDPWTFGGG |
| | | | | TKLEIKRTVAAPQIVLTQSPAIMSASPGEKVTMTC |
| | | | | SASSSVSYMNWYQQKSGTSPKRWIYDTSKLASGVP |
| | | | | AHFRGSGSGTSYSLTISGMEAEDAATYYCQQWSSN |
| | | | | PFTFGSGTKLEINR |

### Example 2.58

### Generation of CD-3 (Seq. 2) and EGFR (Seq. 2) DVD-Igs

TABLE 111

| | DVD | Outer | Inner | |
|---|---|---|---|---|
| SEQ | Variable | Variable | Variable | |
| ID | Domain | Domain | Domain | Sequence |
| NO | Name | Name | Name | 12345678901234567890123456789012345 |
| 340 | DVD139H | AB039VH | AB033VH | QVQLQQSGAELARPGASVKMSCKASGYTFTRYTMH |
| | | | | WVKQRPGQGLEWIGYINPSRGYTNYNQKFKDKATL |
| | | | | TTDKSSSTAYMQLSSLTSEDSAVYYCARYYDDHYC |
| | | | | LDYWGQGTTLTVSSASTKGPQVQLKQSGPGLVQPS |
| | | | | QSLSITCTVSGFSLTNYGVHWVRQSPGKGLEWLGV |
| | | | | IWSGGNTDYNTPFTSRLSINKDNSKSQVFFKMNSL |
| | | | | QSNDTAIYYCARALTYYDYEFAYWGQGTLVTVSA |
| 341 | DVD139L | AB039VL | AB033VL | QIVLTQSPAIMSASPGEKVTMTCSASSSVSYMNWY |
| | | | | QQKSGTSPKRWIYDTSKLASGVPAHFRGSGSGTSY |
| | | | | SLTISGMEAEDAATYYCQQWSSNPFTFGSGTKLEI |
| | | | | NRTVAAPDILLTQSPVILSVSPGERVSFSCRASQS |
| | | | | IGTNIHWYQQRTNGSPRLLIKYASESISGIPSRFS |
| | | | | GSGSGTDFTLSINSVESEDIADYYCQQNNNWPTTF |
| | | | | GAGTKLELKR |
| 342 | DVD140H | AB033VH | AB039VH | QVQLKQSGPGLVQPSQSLSITCTVSGFSLTNYGVH |
| | | | | WVRQSPGKGLEWLGVIWSGGNTDYNTPFTSRLSIN |
| | | | | KDNSKSQVFFKMNSLQSNDTAIYYCARALTYYDYE |
| | | | | FAYWGQGTLVTVSAASTKGPQVQLQQSGAELARPG |
| | | | | ASVKMSCKASGYTFTRYTMHWVKQRPGQGLEWIGY |
| | | | | INPSRGYTNYNQKFKDKATLTTDKSSSTAYMQLSS |
| | | | | LTSEDSAVYYCARYYDDHYCLDYWGQGTTLTVSS |
| 343 | DVD140L | AB033VL | AB039VL | DILLTQSPVILSVSPGERVSFSCRASQSIGTNIHW |
| | | | | YQQRTNGSPRLLIKYASESISGIPSRFSGSGSGTD |
| | | | | FTLSINSVESEDIADYYCQQNNNWPTTFGAGTKLE |
| | | | | LKRTVAAPQIVLTQSPAIMSASPGEKVTMTCSASS |
| | | | | SVSYMNWYQQKSGTSPKRWIYDTSKLASGVPAHFR |
| | | | | GSGSGTSYSLTISGMEAEDAATYYCQQWSSNPFTF |
| | | | | GSGTKLEINR |

### Example 2.59

### Generation of CD-3 (Seq. 2) and EGFR (Seq. 1) DVD-Igs

TABLE 112

| | DVD | Outer | Inner | |
|---|---|---|---|---|
| SEQ | Variable | Variable | Variable | |
| ID | Domain | Domain | Domain | Sequence |
| NO | Name | Name | Name | 12345678901234567890123456789012345 |
| 344 | DVD141H | AB039VH | AB003VH | QVQLQQSGAELARPGASVKMSCKASGYTFTRYTMH |
| | | | | WVKQRPGQGLEWIGYINPSRGYTNYNQKFKDKATL |
| | | | | TTDKSSSTAYMQLSSLTSEDSAVYYCARYYDDHYC |
| | | | | LDYWGQGTTLTVSSASTKGPQVQLQESGPGLVKPS |
| | | | | ETLSLTCTVSGGSVSSGDYYWTWIRQSPGKGLEWI |
| | | | | GHIYYSGNTNYNPSLKSRLTISIDTSKTQFSLKLS |
| | | | | SVTAADTAIYYCVRDRVTGAFDIWGQGTMVTVSS |
| 345 | DVD141L | AB039VL | AB003VL | QIVLTQSPAIMSASPGEKVTMTCSASSSVSYMNWY |
| | | | | QQKSGTSPKRWIYDTSKLASGVPAHFRGSGSGTSY |
| | | | | SLTISGMEAEDAATYYCQQWSSNPFTFGSGTKLEI |
| | | | | NRTVAAPDIQMTQSPSSLSASVGDRVTITCQASQD |
| | | | | ISNYLNWYQQKPGKAPKLLIYDASNLETGVPSRFS |
| | | | | GSGSGTDFTFTISSLQPEDIATYFCQHFDHLPLAF |
| | | | | GGGTKVEIKR |
| 346 | DVD142H | AB003VH | AB039VH | QVQLQESGPGLVKPSETLSLTCTVSGGSVSSGDYY |
| | | | | WTWIRQSPGKGLEWIGHIYYSGNTNYNPSLKSRLT |
| | | | | ISIDTSKTQFSLKLSSVTAADTAIYYCVRDRVTGA |
| | | | | FDIWGQGTMVTVSSASTKGPQVQLQQSGAELARPG |
| | | | | ASVKMSCKASGYTFTRYTMHWVKQRPGQGLEWIGY |
| | | | | INPSRGYTNYNQKFKDKATLTTDKSSSTAYMQLSS |
| | | | | LTSEDSAVYYCARYYDDHYCLDYWGQGTTLTVSS |
| 347 | DVD142L | AB003VL | AB039VL | DIQMTQSPSSLSASVGDRVTITCQASQDISNYLNW |
| | | | | YQQKPGKAPKLLIYDASNLETGVPSRFSGSGSGTD |
| | | | | FTFTISSLQPEDIATYFCQHFDHLPLAFGGGTKVE |
| | | | | IKRTVAAPQIVLTQSPAIMSASPGEKVTMTCSASS |
| | | | | SVSYMNWYQQKSGTSPKRWIYDTSKLASGVPAHFR |
| | | | | GSGSGTSYSLTISGMEAEDAATYYCQQWSSNPFTF |
| | | | | GSGTKLEINR |

### Example 2.60

### Generation of EGFR (Seq. 1) and IGF1,2 DVD-Igs

TABLE 113

| | DVD | Outer | Inner | |
|---|---|---|---|---|
| SEQ | Variable | Variable | Variable | |
| ID | Domain | Domain | Domain | Sequence |
| NO | Name | Name | Name | 12345678901234567890123456789012345 |
| 348 | DVD143H | AB003VH | AB010VH | QVQLQESGPGLVKPSETLSLTCTVSGGSVSSGDYY |
| | | | | WTWIRQSPGKGLEWIGHIYYSGNTNYNPSLKSRLT |
| | | | | ISIDTSKTQFSLKLSSVTAADTAIYYCVRDRVTGA |
| | | | | FDIWGQGTMVTVSSASTKGPQVQLVQSGAEVKKPG |
| | | | | ASVKVSCKASGYTFTSYDINWVRQATGQGLEWMGW |
| | | | | MNPNSGNTGYAQKFQGRVTMTRNTSISTAYMELSS |
| | | | | LRSEDTAVYYCARDPYYYYYGMDVWGQGTTVTVSS |
| 349 | DVD143L | AB003VL | AB010VL | DIQMTQSPSSLSASVGDRVTITCQASQDISNYLNW |
| | | | | YQQKPGKAPKLLIYDASNLETGVPSRFSGSGSGTD |
| | | | | FTFTISSLQPEDIATYFCQHFDHLPLAFGGGTKVE |
| | | | | IKRTVAAPQSVLTQPPSVSAAPGQKVTISCSGSSS |
| | | | | NIENNHVSWYQQLPGTAPKLLIYDNNKRPSGIPDR |
| | | | | FSGSKSGTSATLGITGLQTGDEADYYCETWDTSLS |
| | | | | AGRVFGGGTKLTVLG |
| 350 | DVD144H | AB010VH | AB003VH | QVQLVQSGAEVKKPGASVKVSCKASGYTFTSYDIN |
| | | | | WVRQATGQGLEWMGWMNPNSGNTGYAQKFQGRVTM |
| | | | | TRNTSISTAYMELSSLRSEDTAVYYCARDPYYYYY |
| | | | | GMDVWGQGTTVTVSSASTKGPQVQLQESGPGLVKP |
| | | | | SETLSLTCTVSGGSVSSGDYYWTWIRQSPGKGLEW |
| | | | | IGHIYYSGNTNYNPSLKSRLTISIDTSKTQFSLKL |
| | | | | SSVTAADTAIYYCVRDRVTGAFDIWGQGTMVTVSS |
| 351 | DVD144L | AB010VL | AB003VL | QSVLTQPPSVSAAPGQKVTISCSGSSSNIENNHVS |
| | | | | WYQQLPGTAPKLLIYDNNKRPSGIPDRFSGSKSGT |
| | | | | SATLGITGLQTGDEADYYCETWDTSLSAGRVFGGG |
| | | | | TKLTVLGQPKAAPDIQMTQSPSSLSASVGDRVTIT |
| | | | | CQASQDISNYLNWYQQKPGKAPKLLIYDASNLETG |
| | | | | VPSRFSGSGSGTDFTFTISSLQPEDIATYFCQHFD |
| | | | | HLPLAFGGGTKVEIKR |

### Example 2.61

### Generation of DLL-4 (Seq. 1) and PLGF (Seq. 1) DVD-Igs

TABLE 114

| | DVD | Outer | Inner | |
|---|---|---|---|---|
| SEQ | Variable | Variable | Variable | |
| ID | Domain | Domain | Domain | Sequence |
| NO | Name | Name | Name | 12345678901234567890123456789012345 |
| 352 | 7H | AB015VH | AB047VH | EVQLVESGGGLVQPGGSLRLSCAASGFTFTDNWIS |
| | | | | WVRQAPGKGLEWVGYISPNSGFTYYADSVKGRFTI |
| | | | | SADTSKNTAYLQMNSLRAEDTAVYYCARDNFGGYF |
| | | | | DYWGQGTLVTVSSLASTKGPQVQLQQSGAELVKPGA |
| | | | | SVKISCKASGYTFTDYYINWVKLAPGQGLEWIGWI |
| | | | | YPGSGNTKYNEKFKGKATLTIDTSSSTAYMQLSSL |
| | | | | TSEDTAVYFCVRDSPFFDYWGQGTLLTVSS |
| 353 | VD257L | AB015VL | AB047VL | DIQMTQSPSSLSASVGDRVTITCRASQDVSTAVAW |
| | | | | YQQKPGKAPKLLIYSASFLYSGVPSRFSGSGSGTD |
| | | | | FTLTISSLQPEDFATTYYCQQSYTGTVTFGQGTKV |
| | | | | EIKRTVAAPDIVLTQSPDSLAVSLGERVTMNCKSS |
| | | | | QSLLNSGMRKSFLAWYQQKPGQSPKLLIYWASTRE |
| | | | | SGVPDRFTGSGSGTDFTLTISSVQAEDVAVYYCKQ |
| | | | | SYHLFTFGSGTKLEIKR |
| 354 | VD258H | AB047VH | AB015VH | QVQLQQSGAELVKPGASVKISCKASGYTFTDYYIN |
| | | | | WVKLAPGQGLEWIGWIYPGSGNTKYNEKFKGKATL |
| | | | | TIDTSSSTAYMQLSSLTSEDTAVYFCVRDSPFFDY |
| | | | | WGQGTLLTVSSASTKGPEVQLVESGGGLVQPGGSL |
| | | | | RLSCAASGFTFTDNWISWVRQAPGKGLEWVGYISP |
| | | | | NSGFTYYADSVKGRFTISADTSKNTAYLQMNSLRA |
| | | | | EDTAVYYCARDNFGGYFDYWGQGTLVTVSS |
| 355 | VD258L | AB047VL | AB015VL | DIVLTQSPDSLAVSLGERVTMNCKSSQSLLNSGMR |
| | | | | KSFLAWYQQKPGQSPKLLIYWASTRESGVPDRFTG |
| | | | | SGSGTDFTLTISSVQAEDVAVYYCKQSYHLFTFGS |
| | | | | GTKLEIKRTVAAPDIQMTQSPSSLSASVGDRVTIT |
| | | | | CRASQDVSTAVAWYQQKPGKAPKLLIYSASFLYSG |
| | | | | VPSRFSGSGSGTDFTLTISSLQPEDFATTYYCQQS |
| | | | | YTGTVTFGQGTKVEIKR |

### Example 2.62

### Generation of VEGF (Seq. 1) and PLGF (Seq. 1) DVD-Igs with Linker Set 1

TABLE 115

| | DVD | Outer | Inner | |
|---|---|---|---|---|
| SEQ | Variable | Variable | Variable | |
| ID | Domain | Domain | Domain | Sequence |
| NO | Name | Name | Name | 12345678901234567890123456789012345 |
| 356 | VD259H | AB014VH | AB047VH | EVQLVESGGGLVQPGGSLRLSCAASGYTFTNYGMN |
| | | | | WVRQAPGKGLEWVGWINTYTGEPTYAADFKRRFTF |
| | | | | SLDTSKSTAYLQMNSLRAEDTAVYYCAKYPHYYGS |
| | | | | SHWYFDVWGQGTLVTVSSASTKGPQVQLQQSGAEL |
| | | | | VKPGASVKISCKASGYTFTDYYINWVKLAPGQGLE |
| | | | | WIGWIYPGSGNTKYNEKFKGKATLTIDTSSSTAYM |
| | | | | QLSSLTSEDTAVYFCVRDSPFFDYWGQGTLLTVSS |
| 357 | VD259L | AB014VL | AB047VL | DIQMTQSPSSLSASVGDRVTITCSASQDISNYLNW |
| | | | | YQQKPGKAPKVLIYFTSSLHSGVPSRFSGSGSGTD |
| | | | | FTLTISSLQPEDFATYYCQQYSTVPWTFGQGTKVE |
| | | | | IKRTVAAPDIVLTQSPDSLAVSLGERVTMNCKSSQ |
| | | | | SLLNSGMRKSFLAWYQQKPGQSPKLLIYWASTRES |
| | | | | GVPDRFTGSGSGTDFTLTISSVQAEDVAVYYCKQS |
| | | | | YHLFTFGSGTKLEIKR |
| 358 | VD260H | AB047VH | AB014VH | QVQLQQSGAELVKPGASVKISCKASGYTFTDYYIN |
| | | | | WVKLAPGQGLEWIGWIYPGSGNTKYNEKFKGKATL |
| | | | | TIDTSSSTAYMQLSSLTSEDTAVYFCVRDSPFFDY |
| | | | | WGQGTLLTVSSASTKGPEVQLVESGGGLVQPGGSL |
| | | | | RLSCAASGYTFTNYGMNWVRQAPGKGLEWVGWINT |
| | | | | YTGEPTYAADFKRRFTFSLDTSKSTAYLQMNSLRA |
| | | | | EDTAVYYCAKYPHYYGSSHWYFDVWGQGTLVTVSS |
| 359 | VD260L | AB047VL | AB014VL | DIVLTQSPDSLAVSLGERVTMNCKSSQSLLNSGMR |
| | | | | KSFLAWYQQKPGQSPKLLIYWASTRESGVPDRFTG |
| | | | | SGSGTDFTLTISSVQAEDVAVYYCKQSYHLFTFGS |
| | | | | GTKLEIKRTVAAPDIQMTQSPSSLSASVGDRVTIT |
| | | | | CSASQDISNYLNWYQQKPGKAPKVLIYFTSSLHSG |
| | | | | VPSRFSGSGSGTDFTLTISSLQPEDFATYYCQQYS |
| | | | | TVPWTFGQGTKVEIKR |

### Example 2.63

### Generation of VEGF (Seq. 1) and PLGF (Seq. 1) DVD-Igs with Linker Set 2

TABLE 116

| | DVD | Outer | Inner | |
|---|---|---|---|---|
| SEQ | Variable | Variable | Variable | |
| ID | Domain | Domain | Domain | Sequence |
| NO | Name | Name | Name | 12345678901234567890123456789012345 |
| 360 | DVD579H | AB047VH | AB014VH | QVQLQQSGAELVKPGASVKISCKASGYTFTDYYIN |
| | | | | WVKLAPGQGLEWIGWIYPGSGNTKYNEKFKGKATL |
| | | | | TIDTSSSTAYMQLSSLTSEDTAVYFCVRDSPFFDY |
| | | | | WGQGTLLTVSSASTKGPSVFPLAPEVQLVESGGGL |
| | | | | VQPGGSLRLSCAASGYTFTNYGMNWVRQAPGKGLE |
| | | | | WVGWINTYTGEPTYAADFKRRFTFSLDTSKSTAYL |
| | | | | QMNSLRAEDTAVYYCAKYPHYYGSSHWYFDVWGQG |
| | | | | TLVTVSS |
| 361 | DVD579L | AB047VL | AB014VL | DIVLTQSPDSLAVSLGERVTMNCKSSQSLLNSGMR |
| | | | | KSFLAWYQQKPGQSPKLLIYWASTRESGVPDRFTG |
| | | | | SGSGTDFTLTISSVQAEDVAVYYCKQSYHLFTFGS |
| | | | | GTKLEIKRTVAAPSVFIFPPDIQMTQSPSSLSASV |
| | | | | GDRVTITCSASQDISNYLNWYQQKPGKAPKVLIYF |
| | | | | TSSLHSGVPSRFSGSGSGTDFTLTISSLQPEDFAT |
| | | | | YYCQQYSTVPWTFGQGTKVEIKR |
| 362 | DVD580H | AB014VH | AB047VH | EVQLVESGGGLVQPGGSLRLSCAASGYTFTNYGMN |
| | | | | WVRQAPGKGLEWVGWINTYTGEPTYAADFKRRFTF |
| | | | | SLDTSKSTAYLQMNSLRAEDTAVYYCAKYPHYYGS |
| | | | | SHWYFDVWGQGTLVTVSSASTKGPSVFPLAPQVQL |
| | | | | QQSGAELVKPGASVKISCKASGYTFTDYYINWVKL |
| | | | | APGQGLEWIGWIYPGSGNTKYNEKFKGKATLTIDT |
| | | | | SSSTAYMQLSSLTSEDTAVYFCVRDSPFFDYWGQG |
| | | | | TLLTVSS |
| 363 | DVD580L | AB014VL | AB047VL | DIQMTQSPSSLSASVGDRVTITCSASQDISNYLNW |
| | | | | YQQKPGKAPKVLIYFTSSLHSGVPSRFSGSGSGTD |
| | | | | FTLTISSLQPEDFATYYCQQYSTVPWTFGQGTKVE |
| | | | | IKRTVAAPSVFIFPPDIVLTQSPDSLAVSLGERVT |
| | | | | MNCKSSQSLLNSGMRKSFLAWYQQKPGQSPKLLIY |
| | | | | WASTRESGVPDRFTGSGSGTDFTLTISSVQAEDVA |
| | | | | VYYCKQSYHLFTFGSGTKLEIKR |

### Example 2.64

### Generation of VEGF (Seq. 1) and PLGF (Seq. 1) DVD-Igs with Linker Set 3

TABLE 117

| | DVD | Outer | Inner | |
|---|---|---|---|---|
| SEQ | Variable | Variable | Variable | |
| ID | Domain | Domain | Domain | Sequence |
| NO | Name | Name | Name | 12345678901234567890123456789012345 |
| 364 | DVD587VH | AB047VH | AB014VH | QVQLQQSGAELVKPGASVKISCKASGYTFTDYYIN |
| | | | | WVKLAPGQGLEWIGWIYPGSGNTKYNEKFKGKATL |
| | | | | TIDTSSSTAYMQLSSLTSEDTAVYFCVRDSPFFDY |
| | | | | WGQGTLLTVSSASTKGPSVFPLAPEVQLVESGGGL |
| | | | | VQPGGSLRLSCAASGYTFTNYGMNWVRQAPGKGLE |
| | | | | WVGWINTYTGEPTYAADFKRRFTFSLDTSKSTAYL |
| | | | | QMNSLRAEDTAVYYCAKYPHYYGSSHWYFDVWGQG |
| | | | | TLVTVSS |
| 365 | DVD587VL | AB047VL | AB014VL | DIVLTQSPDSLAVSLGERVTMNCKSSQSLLNSGMR |
| | | | | KSFLAWYQQKPGQSPKLLIYWASTRESGVPDRFTG |
| | | | | SGSGTDFTLTISSVQAEDVAVYYCKQSYHLFTFGS |
| | | | | GTKLEIKRTVAAPDIQMTQSPSSLSASVGDRVTIT |
| | | | | CSASQDISNYLNWYQQKPGKAPKVLIYFTSSLHSG |
| | | | | VPSRFSGSGSGTDFTLTISSLQPEDFATYYCQQYS |
| | | | | TVPWTFGQGTKVEIKR |
| 366 | DVD588VH | AB014VH | AB047VH | EVQLVESGGGLVQPGGSLRLSCAASGYTFTNYGMN |
| | | | | WVRQAPGKGLEWVGWINTYTGEPTYAADFKRRFTF |
| | | | | SLDTSKSTAYLQMNSLRAEDTAVYYCAKYPHYYGS |
| | | | | SHWYFDVWGQGTLVTVSSASTKGPSVFPLAPQVQL |
| | | | | QQSGAELVKPGASVKISCKASGYTFTDYYINWVKL |
| | | | | APGQGLEWIGWIYPGSGNTKYNEKFKGKATLTIDT |
| | | | | SSSTAYMQLSSLTSEDTAVYFCVRDSPFFDYWGQG |
| | | | | TLLTVSS |
| 367 | DVD588VL | AB014VL | AB047VL | DIQMTQSPSSLSASVGDRVTITCSASQDISNYLNW |
| | | | | YQQKPGKAPKVLIYFTSSLHSGVPSRFSGSGSGTD |
| | | | | FTLTISSLQPEDFATYYCQQYSTVPWTFGQGTKVE |
| | | | | IKRTVAAPDIVLTQSPDSLAVSLGERVTMNCKSSQ |
| | | | | SLLNSGMRKSFLAWYQQKPGQSPKLLIYWASTRES |
| | | | | GVPDRFTGSGSGTDFTLTISSVQAEDVAVYYCKQS |
| | | | | YHLFTFGSGTKLEIKR |

### Example 2.65

### Generation of VEGF (Seq. 1) and PLGF (Seq. 1) DVD-Igs with Linker Set 4

TABLE 118

| | DVD | Outer | Inner | |
|---|---|---|---|---|
| SEQ | Variable | Variable | Variable | |
| ID | Domain | Domain | Domain | Sequence |
| NO | Name | Name | Name | 12345678901234567890123456789012345 |
| 368 | DVD595VH | AB047VH | AB014VH | QVQLQQSGAELVKPGASVKISCKASGYTFTDYYIN |
| | | | | WVKLAPGQGLEWIGWIYPGSGNTKYNEKFKGKATL |
| | | | | TIDTSSSTAYMQLSSLTSEDTAVYFCVRDSPFFDY |
| | | | | WGQGTLLTVSSASTKGPEVQLVESGGGLVQPGGSL |
| | | | | RLSCAASGYTFTNYGMNWVRQAPGKGLEWVGWINT |
| | | | | YTGEPTYAADFKRRFTFSLDTSKSTAYLQMNSLRA |
| | | | | EDTAVYYCAKYPHYYGSSHWYFDVWGQGTLVTVSS |
| 369 | DVD595VL | AB047VL | AB014VL | DIVLTQSPDSLAVSLGERVTMNCKSSQSLLNSGMR |
| | | | | KSFLAWYQQKPGQSPKLLIYWASTRESGVPDRFTG |
| | | | | SGSGTDFTLTISSVQAEDVAVYYCKQSYHLFTFGS |
| | | | | GTKLEIKRTVAAPSVFIFPPDIQMTQSPSSLSASV |
| | | | | GDRVTITCSASQDISNYLNWYQQKPGKAPKVLIYF |
| | | | | TSSLHSGVPSRFSGSGSGTDFTLTISSLQPEDFAT |
| | | | | YYCQQYSTVPWTFGQGTKVEIKR |
| 370 | DVD596VH | AB014VH | AB047VH | EVQLVESGGGLVQPGGSLRLSCAASGYTFTNYGMN |
| | | | | WVRQAPGKGLEWVGWINTYTGEPTYAADFKRRFTF |
| | | | | SLDTSKSTAYLQMNSLRAEDTAVYYCAKYPHYYGS |
| | | | | SHWYFDVWGQGTLVTVSSASTKGPQVQLQQSGAEL |
| | | | | VKPGASVKISCKASGYTFTDYYINWVKLAPGQGLE |
| | | | | WIGWIYPGSGNTKYNEKFKGKATLTIDTSSSTAYM |
| | | | | QLSSLTSEDTAVYFCVRDSPFFDYWGQGTLLTVSS |
| 371 | DVD596VL | AB014VL | AB047VL | DIQMTQSPSSLSASVGDRVTITCSASQDISNYLNW |
| | | | | YQQKPGKAPKVLIYFTSSLHSGVPSRFSGSGSGTD |
| | | | | FTLTISSLQPEDFATYYCQQYSTVPWTFGQGTKVE |
| | | | | IKRTVAAPSVFIFPPDIVLTQSPDSLAVSLGERVT |
| | | | | MNCKSSQSLLNSGMRKSFLAWYQQKPGQSPKLLIY |
| | | | | WASTRESGVPDRFTGSGSGTDFTLTISSVQAEDVA |
| | | | | VYYCKQSYHLFTFGSGTKLEIKR |

### Example 2.66

### Generation of EGFR (Seq. 2) and ErbB3 (Seq. 1) DVD-Igs with Linker Set 1

TABLE 119

| | DVD | Outer | Inner | |
|---|---|---|---|---|
| SEQ | Variable | Variable | Variable | |
| ID | Domain | Domain | Domain | Sequence |
| NO | Name | Name | Name | 12345678901234567890123456789012345 |
| 372 | VD299H | AB062VH | AB033VH | QVQLQQWGAGLLKPSETLSLTCAVYGGSFSGYYWS |
| | | | | WIRQPPGKGLEWIGEINHSGSTNYNPSLKSRVTIS |
| | | | | VETSKNQFSLKLSSVTAADTAVYYCARDKWTWYFD |
| | | | | LWGRGTLVTVSSASTKGPQVQLKQSGPGLVQPSQS |
| | | | | LSITCTVSGFSLTNYGVHWVRQSPGKGLEWLGVIW |
| | | | | SGGNTDYNTPFTSRLSINKDNSKSQVFFKMNSLQS |
| | | | | NDTAIYYCARALTYYDYEFAYWGQGTLVTVSA |
| 373 | VD299L | AB062VL | AB033VL | DIEMTQSPDSLAVSLGERATINCRSSQSVLYSSSN |
| | | | | RNYLAWYQQNPGQPPKLLIYWASTRESGVPDRFSG |
| | | | | SGSGTDFTLTISSLQAEDVAVYYCQQYYSTPRTFG |
| | | | | QGTKVEIKRTVAAPDILLTQSPVILSVSPGERVSF |
| | | | | SCRASQSIGTNIHWYQQRTNGSPRLLIKYASESIS |
| | | | | GIPSRFSGSGSGTDFTLSINSVESEDIADYYCQQN |
| | | | | NNWPTTFGAGTKLELKR |
| 374 | VD300H | AB033VH | AB062VH | QVQLKQSGPGLVQPSQSLSITCTVSGFSLTNYGVH |
| | | | | WVRQSPGKGLEWLGVIWSGGNTDYNTPFTSRLSIN |
| | | | | KDNSKSQVFFKMNSLQSNDTAIYYCARALTYYDYE |
| | | | | FAYWGQGTLVTVSAASTKGPQVQLQQWGAGLLKPS |
| | | | | ETLSLTCAVYGGSFSGYYWSWIRQPPGKGLEWIGE |
| | | | | INHSGSTNYNPSLKSRVTISVETSKNQFSLKLSSV |
| | | | | TAADTAVYYCARDKWTWYFDLWGRGTLVTVSS |
| 375 | VD300L | AB033VL | AB062VL | DILLTQSPVILSVSPGERVSFSCRASQSIGTNIHW |
| | | | | YQQRTNGSPRLLIKYASESISGIPSRFSGSGSGTD |
| | | | | FTLSINSVESEDIADYYCQQNNNWPTTFGAGTKLE |
| | | | | LKRTVAAPDIEMTQSPDSLAVSLGERATINCRSSQ |
| | | | | SVLYSSSNRNYLAWYQQNPGQPPKLLIYWASTRES |
| | | | | GVPDRFSGSGSGTDFTLTISSLQAEDVAVYYCQQY |
| | | | | YSTPRTFGQGTKVEIKR |

### Example 2.67

### Generation of EGFR (Seq. 2) and ErbB3 (Seq. 1) DVD-Igs with Linker Set 2

TABLE 120

| | DVD | Outer | Inner | |
|---|---|---|---|---|
| SEQ | Variable | Variable | Variable | |
| ID | Domain | Domain | Domain | Sequence |
| NO | Name | Name | Name | 12345678901234567890123456789012345 |
| 376 | DVD385H | AB062 | AB033 | QVQLQQWGAGLLKPSETLSLTCAVYGGSFSGYYWS |
| | | | | WIRQPPGKGLEWIGEINHSGSTNYNPSLKSRVTIS |
| | | | | VETSKNQFSLKLSSVTAADTAVYYCARDKWTWYFD |
| | | | | LWGRGTLVTVSSASTKGPSVFPLAPQVQLKQSGPG |
| | | | | LVQPSQSLSITCTVSGFSLTNYGVHWVRQSPGKGL |
| | | | | EWLGVIWSGGNTDYNTPFTSRLSINKDNSKSQVFF |
| | | | | KMNSLQSNDTAIYYCARALTYYDYEFAYWGQGTLV |
| | | | | TVSA |
| 377 | DVD385L | AB062 | AB033 | DIEMTQSPDSLAVSLGERATINCRSSQSVLYSSSN |
| | | | | RNYLAWYQQNPGQPPKLLIYWASTRESGVPDRFSG |
| | | | | SGSGTDFTLTISSLQAEDVAVYYCQQYYSTPRTFG |
| | | | | QGTKVEIKRTVAAPSVFIFPPDILLTQSPVILSVS |
| | | | | PGERVSFSCRASQSIGTNIHWYQQRTNGSPRLLIK |
| | | | | YASESISGIPSRFSGSGSGTDFTLSINSVESEDIA |
| | | | | DYYCQQNNNWPTTFGAGTKLELKR |
| 378 | DVD386H | AB033 | AB062 | QVQLKQSGPGLVQPSQSLSITCTVSGFSLTNYGVH |
| | | | | WVRQSPGKGLEWLGVIWSGGNTDYNTPFTSRLSIN |
| | | | | KDNSKSQVFFKMNSLQSNDTAIYYCARALTYYDYE |
| | | | | FAYWGQGTLVTVSAASTKGPSVFPLAPQVQLQQWG |
| | | | | AGLLKPSETLSLTCAVYGGSFSGYYWSWIRQPPGK |
| | | | | GLEWIGEINHSGSTNYNPSLKSRVTISVETSKNQF |
| | | | | SLKLSSVTAADTAVYYCARDKWTWYFDLWGRGTLV |
| | | | | TVSS |
| 379 | DVD386L | AB033 | AB062 | DILLTQSPVILSVSPGERVSFSCRASQSIGTNIHW |
| | | | | YQQRTNGSPRLLIKYASESISGIPSRFSGSGSGTD |
| | | | | FTLSINSVESEDIADYYCQQNNNWPTTFGAGTKLE |
| | | | | LKRTVAAPSVFIFPPDIEMTQSPDSLAVSLGERAT |
| | | | | INCRSSQSVLYSSSNRNYLAWYQQNPGQPPKLLIY |
| | | | | WASTRESGVPDRFSGSGSGTDFTLTISSLQAEDVA |
| | | | | VYYCQQYYSTPRTFGQGTKVEIKR |

### Example 2.68

### Generation of EGFR (Seq. 2) and ErbB3 (Seq. 1) DVD-Igs with Linker Set 3

TABLE 121

| | DVD | Outer | Inner | |
|---|---|---|---|---|
| SEQ | Variable | Variable | Variable | |
| ID | Domain | Domain | Domain | Sequence |
| NO | Name | Name | Name | 12345678901234567890123456789012345 |
| 380 | DVD389H | AB062 | AB033 | QVQLQQWGAGLLKPSETLSLTCAVYGGSFSGYYWS |
| | | | | WIRQPPGKGLEWIGEINHSGSTNYNPSLKSRVTIS |
| | | | | VETSKNQFSLKLSSVTAADTAVYYCARDKWTWYFD |
| | | | | LWGRGTLVTVSSASTKGPSVFPLAPQVQLKQSGPG |
| | | | | LVQPSQSLSITCTVSGFSLTNYGVHWVRQSPGKGL |
| | | | | EWLGVIWSGGNTDYNTPFTSRLSINKDNSKSQVFF |
| | | | | KMNSLQSNDTAIYYCARALTYYDYEFAYWGQGTLV |
| | | | | TVSA |
| 381 | DVD389L | AB062 | AB033 | DIEMTQSPDSLAVSLGERATINCRSSQSVLYSSSN |
| | | | | RNYLAWYQQNPGQPPKLLIYWASTRESGVPDRFSG |
| | | | | SGSGTDFTLTISSLQAEDVAVYYCQQYYSTPRTFG |
| | | | | QGTKVEIKRTVAAPDILLTQSPVILSVSPGERVSF |
| | | | | SCRASQSIGTNIHWYQQRTNGSPRLLIKYASESIS |
| | | | | GIPSRFSGSGSGTDFTLSINSVESEDIADYYCQQN |
| | | | | NNWPTTFGAGTKLELKR |
| 382 | DVD390H | AB033 | AB062 | QVQLKQSGPGLVQPSQSLSITCTVSGFSLTNYGVH |
| | | | | WVRQSPGKGLEWLGVIWSGGNTDYNTPFTSRLSIN |
| | | | | KDNSKSQVFFKMNSLQSNDTAIYYCARALTYYDYE |
| | | | | FAYWGQGTLVTVSAASTKGPSVFPLAPQVQLQQWG |
| | | | | AGLLKPSETLSLTCAVYGGSFSGYYWSWIRQPPGK |
| | | | | GLEWIGEINHSGSTNYNPSLKSRVTISVETSKNQF |
| | | | | SLKLSSVTAADTAVYYCARDKWTWYFDLWGRGTLV |
| | | | | TVSS |
| 383 | DVD390L | AB033 | AB062 | DILLTQSPVILSVSPGERVSFSCRASQSIGTNIHW |
| | | | | YQQRTNGSPRLLIKYASESISGIPSRFSGSGSGTD |
| | | | | FTLSINSVESEDIADYYCQQNNNWPTTFGAGTKLE |
| | | | | LKRTVAAPDIEMTQSPDSLAVSLGERATINCRSSQ |
| | | | | SVLYSSSNRNYLAWYQQNPGQPPKLLIYWASTRES |
| | | | | GVPDRFSGSGSGTDFTLTISSLQAEDVAVYYCQQY |
| | | | | YSTPRTFGQGTKVEIKR |

### Example 2.69

### Generation of EGFR (Seq. 2) and ErbB3 (Seq. 1) DVD-Igs with Linker Set 4

TABLE 122

| | DVD | Outer | Inner | |
|---|---|---|---|---|
| SEQ | Variable | Variable | Variable | |
| ID | Domain | Domain | Domain | Sequence |
| NO | Name | Name | Name | 12345678901234567890123456789012345 |
| 384 | DVD393H | AB062 | AB033 | QVQLQQWGAGLLKPSETLSLTCAVYGGSFSGYYWS |
| | | | | WIRQPPGKGLEWIGEINHSGSTNYNPSLKSRVTIS |
| | | | | VETSKNQFSLKLSSVTAADTAVYYCARDKWTWYFD |
| | | | | LWGRGTLVTVSSASTKGPQVQLKQSGPGLVQPSQS |
| | | | | LSITCTVSGFSLTNYGVHWVRQSPGKGLEWLGVIW |
| | | | | SGGNTDYNTPFTSRLSINKDNSKSQVFFKMNSLQS |
| | | | | NDTAIYYCARALTYYDYEFAYWGQGTLVTVSA |
| 385 | DVD393L | AB062 | AB033 | DIEMTQSPDSLAVSLGERATINCRSSQSVLYSSSN |
| | | | | RNYLAWYQQNPGQPPKLLIYWASTRESGVPDRFSG |
| | | | | SGSGTDFTLTISSLQAEDVAVYYCQQYYSTPRTFG |
| | | | | QGTKVEIKRTVAAPSVFIFPPDILLTQSPVILSVS |
| | | | | PGERVSFSCRASQSIGTNIHWYQQRTNGSPRLLIK |
| | | | | YASESISGIPSRFSGSGSGTDFTLSINSVESEDIA |
| | | | | DYYCQQNNNWPTTFGAGTKLELKR |
| 386 | DVD394H | AB033 | AB062 | QVQLKQSGPGLVQPSQSLSITCTVSGFSLTNYGVH |
| | | | | WVRQSPGKGLEWLGVIWSGGNTDYNTPFTSRLSIN |
| | | | | KDNSKSQVFFKMNSLQSNDTAIYYCARALTYYDYE |
| | | | | FAYWGQGTLVTVSAASTKGPQVQLQQWGAGLLKPS |
| | | | | ETLSLTCAVYGGSFSGYYWSWIRQPPGKGLEWIGE |
| | | | | INHSGSTNYNPSLKSRVTISVETSKNQFSLKLSSV |
| | | | | TAADTAVYYCARDKWTWYFDLWGRGTLVTVSS |
| 387 | DVD394L | AB033 | AB062 | DILLTQSPVILSVSPGERVSFSCRASQSIGTNIHW |
| | | | | YQQRTNGSPRLLIKYASESISGIPSRFSGSGSGTD |
| | | | | FTLSINSVESEDIADYYCQQNNNWPTTFGAGTKLE |
| | | | | LKRTVAAPSVFIFPPDIEMTQSPDSLAVSLGERAT |
| | | | | INCRSSQSVLYSSSNRNYLAWYQQNPGQPPKLLIY |
| | | | | WASTRESGVPDRFSGSGSGTDFTLTISSLQAEDVA |
| | | | | VYYCQQYYSTPRTFGQGTKVEIKR |

### Example 2.70

### Generation of EGFR (Seq. 1) and ErbB3 (Seq. 1) DVD-Igs

TABLE 123

| | DVD | Outer | Inner | |
|---|---|---|---|---|
| SEQ | Variable | Variable | Variable | |
| ID | Domain | Domain | Domain | Sequence |
| NO | Name | Name | Name | 12345678901234567890123456789012345 |
| 388 | DVD301H | AB062VH | AB003VH | QVQLQQWGAGLLKPSETLSLTCAVYGGSFSGYYWS |
| | | | | WIRQPPGKGLEWIGEINHSGSTNYNPSLKSRVTIS |
| | | | | VETSKNQFSLKLSSVTAADTAVYYCARDKWTWYFD |
| | | | | LWGRGTLVTVSSASTKGPQVQLQESGPGLVKPSET |
| | | | | LSLTCTVSGGSVSSGDYYWTWIRQSPGKGLEWIGH |
| | | | | IYYSGNTNYNPSLKSRLTISIDTSKTQFSLKLSSV |
| | | | | TAADTAIYYCVRDRVTGAFDIWGQGTMVTVSS |
| 389 | DVD301L | AB062VL | AB003VL | DIEMTQSPDSLAVSLGERATINCRSSQSVLYSSSN |
| | | | | RNYLAWYQQNPGQPPKLLIYWASTRESGVPDRFSG |
| | | | | SGSGTDFTLTISSLQAEDVAVYYCQQYYSTPRTFG |
| | | | | QGTKVEIKRTVAAPDIQMTQSPSSLSASVGDRVTI |
| | | | | TCQASQDISNYLNWYQQKPGKAPKLLIYDASNLET |
| | | | | GVPSRFSGSGSGTDFTFTISSLQPEDIATYFCQHF |
| | | | | DHLPLAFGGGTKVEIKR |
| 390 | DVD302H | AB003VH | AB062VH | QVQLQESGPGLVKPSETLSLTCTVSGGSVSSGDYY |
| | | | | WTWIRQSPGKGLEWIGHTYYSGNTNYNPSLKSRLT |
| | | | | ISIDTSKTQFSLKLSSVTAADTAIYYCVRDRVTGA |
| | | | | FDIWGQGTMVTVSSASTKGPQVQLQQWGAGLLKPS |
| | | | | ETLSLTCAVYGGSFSGYYWSWIRQPPGKGLEWIGE |
| | | | | INHSGSTNYNPSLKSRVTISVETSKNQFSLKLSSV |
| | | | | TAADTAVYYCARDKWTWYFDLWGRGTLVTVSS |
| 391 | DVD302L | AB003VL | AB062VL | DIQMTQSPSSLSASVGDRVTITCQASQDISNYLNW |
| | | | | YQQKPGKAPKLLIYDASNLETGVPSRFSGSGSGTD |
| | | | | FTFTISSLQPEDIATYFCQHFDHLPLAFGGGTKVE |
| | | | | IKRTVAAPDIEMTQSPDSLAVSLGERATINCRSSQ |
| | | | | SVLYSSSNRNYLAWYQQNPGQPPKLLIYWASTRES |
| | | | | GVPDRFSGSGSGTDFTLTISSLQAEDVAVYYCQQY |
| | | | | YSTPRTFGQGTKVEIKR |

### Example 2.71

### Generation of HGF (Seq. 1) and ErbB3 (Seq. 1) DVD-Igs

TABLE 124

| | DVD | Outer | Inner | |
|---|---|---|---|---|
| SEQ | Variable | Variable | Variable | |
| ID | Domain | Domain | Domain | Sequence |
| NO | Name | Name | Name | 12345678901234567890123456789012345 |
| 392 | DVD303H | AB062VH | AB012VH | QVQLQQWGAGLLKPSETLSLTCAVYGGSFSGYYWS |
| | | | | WIRQPPGKGLEWIGEINHSGSTNYNPSLKSRVTIS |
| | | | | VETSKNQFSLKLSSVTAADTAVYYCARDKWTWYFD |
| | | | | LWGRGTLVTVSSASTKGPQVQLVESGGGLVKPGGS |
| | | | | LRLSCAASGFTFSDYYMSWIRQAPGKGLEWVSYIS |
| | | | | SSGSTIYYADSVKGRFTISRDNAKNSLYLQMNSLR |
| | | | | AEDTAVYYCARDEYNSGWYVLFDYWGQGTLVTVSS |
| 393 | DVD303L | AB062VL | AB012VL | DIEMTQSPDSLAVSLGERATINCRSSQSVLYSSSN |
| | | | | RNYLAWYQQNPGQPPKLLIYWASTRESGVPDRFSG |
| | | | | SGSGTDFTLTISSLQAEDVAVYYCQQYYSTPRTFG |
| | | | | QGTKVEIKRTVAAPDIQMTQSPSSVSASVGDRVTI |
| | | | | TCRASQGISSWLAWYQQKPGKAPNLLIYEASSLQS |
| | | | | GVPSRFGGSGSGTDFTLTISSLQPEDFATYYCQQA |
| | | | | NGFPWTFGQGTKVEIKR |
| 394 | DVD304H | AB012VH | AB062VH | QVQLVESGGGLVKPGGSLRLSCAASGFTFSDYYMS |
| | | | | WIRQAPGKGLEWVSYISSSGSTIYYADSVKGRFTI |
| | | | | SRDNAKNSLYLQMNSLRAEDTAVYYCARDEYNSGW |
| | | | | YVLFDYWGQGTLVTVSSASTKGPQVQLQQWGAGLL |
| | | | | KPSETLSLTCAVYGGSFSGYYWSWIRQPPGKGLEW |
| | | | | IGEINHSGSTNYNPSLKSRVTISVETSKNQFSLKL |
| | | | | SSVTAADTAVYYCARDKWTWYFDLWGRGTLVTVSS |
| 395 | DVD304L | AB012VL | AB062VL | DIQMTQSPSSVSASVGDRVTITCRASQGISSWLAW |
| | | | | YQQKPGKAPNLLIYEASSLQSGVPSRFGGSGSGTD |
| | | | | FTLTISSLQPEDFATYYCQQANGFPWTFGQGTKVE |
| | | | | IKRTVAAPDIEMTQSPDSLAVSLGERATINCRSSQ |
| | | | | SVLYSSSNRNYLAWYQQNPGQPPKLLIYWASTRES |
| | | | | GVPDRFSGSGSGTDFTLTISSLQAEDVAVYYCQQY |
| | | | | YSTPRTFGQGTKVEIKR |

### Example 2.72

### Generation of EGFR (Seq. 2) and ErbB3 (Seq. 2) DVD-Igs with Linker Set 1

TABLE 125

| | DVD | Outer | Inner | |
|---|---|---|---|---|
| SEQ | Variable | Variable | Variable | |
| ID | Domain | Domain | Domain | Sequence |
| NO | Name | Name | Name | 12345678901234567890123456789012345 |
| 396 | DVD305H | AB063VH | AB033VH | EVQLVESGGGLVQPGGSLRLSCAASGFTFSIYSMN |
| | | | | WVRQAPGKGLEWVSYISSSSSTIYYADSVKGRFTI |
| | | | | SRDNAKNSLYLQMNSLRDEDTAVYYCARDRGDFDA |
| | | | | FDIWGQGTMVTVSSASTKGPQVQLKQSGPGLVQPS |
| | | | | QSLSITCTVSGFSLTNYGVHWVRQSPGKGLEWLGV |
| | | | | IWSGGNTDYNTPFTSRLSINKDNSKSQVFFKMNSL |
| | | | | QSNDTAIYYCARALTYYDYEFAYWGQGTLVTVSA |
| 397 | DVD305L | AB063VL | AB033VL | DIQMTQSPSSLSASVGDRVTITCQASQDITNYLNW |
| | | | | YQQKPGKAPKLLIYDASNLETGVPSRFSGSGSGTD |
| | | | | FTFTISSLQPEDIATYNCQQCENFPITFGQGTRLE |
| | | | | IKRTVAAPDILLTQSPVILSVSPGERVSFSCRASQ |
| | | | | SIGTNIHWYQQRTNGSPRLLIKYASESISGIPSRF |
| | | | | SGSGSGTDFTLSINSVESEDIADYYCQQNNNWPTT |
| | | | | FGAGTKLELKR |
| 398 | DVD306H | AB033VH | AB063VH | QVQLKQSGPGLVQPSQSLSITCTVSGFSLTNYGVH |
| | | | | WVRQSPGKGLEWLGVIWSGGNTDYNTPFTSRLSIN |
| | | | | KDNSKSQVFFKMNSLQSNDTAIYYCARALTYYDYE |
| | | | | FAYWGQGTLVTVSAASTKGPEVQLVESGGGLVQPG |
| | | | | GSLRLSCAASGFTFSIYSMNWVRQAPGKGLEWVSY |
| | | | | ISSSSSTIYYADSVKGRFTISRDNAKNSLYLQMNS |
| | | | | LRDEDTAVYYCARDRGDFDAFDIWGQGTMVTVSS |
| 399 | DVD306L | AB033VL | AB063VL | DILLTQSPVILSVSPGERVSFSCRASQSIGTNIHW |
| | | | | YQQRTNGSPRLLIKYASESISGIPSRFSGSGSGTD |
| | | | | FTLSINSVESEDIADYYCQQNNNWPTTFGAGTKLE |
| | | | | LKRTVAAPDIQMTQSPSSLSASVGDRVTITCQASQ |
| | | | | DITNYLNWYQQKPGKAPKLLIYDASNLETGVPSRF |
| | | | | SGSGSGTDFTFTISSLQPEDIATYNCQQCENFPIT |
| | | | | FGQGTRLEIKR |

### Example 2.73

### Generation of EGFR (Seq. 2) and ErbB3 (Seq. 2) DVD-Igs with Linker Set 2

TABLE 126

| | DVD | Outer | Inner | |
|---|---|---|---|---|
| SEQ | Variable | Variable | Variable | |
| ID | Domain | Domain | Domain | Sequence |
| NO | Name | Name | Name | 12345678901234567890123456789012345 |
| 400 | DVD397H | AB063 | AB033 | EVQLVESGGGLVQPGGSLRLSCAASGFTFSIYSMN |
| | | | | WVRQAPGKGLEWVSYISSSSSTIYYADSVKGRFTI |
| | | | | SRDNAKNSLYLQMNSLRDEDTAVYYCARDRGDFDA |
| | | | | FDIWGQGTMVTVSSASTKGPSVFPLAPQVQLKQSG |
| | | | | PGLVQPSQSLSITCTVSGFSLTNYGVHWVRQSPGK |
| | | | | GLEWLGVIWSGGNTDYNTPFTSRLSINKDNSKSQV |
| | | | | FFKMNSLQSNDTAIYYCARALTYYDYEFAYWGQGT |
| | | | | LVTVSA |
| 401 | DVD397L | AB063 | AB033 | DIQMTQSPSSLSASVGDRVTITCQASQDITNYLNW |
| | | | | YQQKPGKAPKLLIYDASNLETGVPSRFSGSGSGTD |
| | | | | FTFTISSLQPEDIATYNCQQCENFPITFGQGTRLE |
| | | | | IKRTVAAPSVFIFPPDILLTQSPVILSVSPGERVS |
| | | | | FSCRASQSIGTNIHWYQQRTNGSPRLLIKYASESI |
| | | | | SGIPSRFSGSGSGTDFTLSINSVESEDIADYYCQQ |
| | | | | NNNWPTTFGAGTKLELKR |
| 402 | DVD398H | AB033 | AB063 | QVQLKQSGPGLVQPSQSLSITCTVSGFSLTNYGVH |
| | | | | WVRQSPGKGLEWLGVIWSGGNTDYNTPFTSRLSIN |
| | | | | KDNSKSQVFFKMNSLQSNDTAIYYCARALTYYDYE |
| | | | | FAYWGQGTLVTVSAASTKGPSVFPLAPEVQLVESG |
| | | | | GGLVQPGGSLRLSCAASGFTFSIYSMNWVRQAPGK |
| | | | | GLEWVSYISSSSSTIYYADSVKGRFTISRDNAKNS |
| | | | | LYLQMNSLRDEDTAVYYCARDRGDFDAFDIWGQGT |
| | | | | MVTVSS |
| 403 | DVD398L | AB033 | AB063 | DILLTQSPVILSVSPGERVSFSCRASQSIGTNIHW |
| | | | | YQQRTNGSPRLLIKYASESISGIPSRFSGSGSGTD |
| | | | | FTLSINSVESEDIADYYCQQNNNWPTTFGAGTKLE |
| | | | | LKRTVAAPSVFIFPPDIQMTQSPSSLSASVGDRVT |
| | | | | ITCQASQDITNYLNWYQQKPGKAPKLLIYDASNLE |
| | | | | TGVPSRFSGSGSGTDFTFTISSLQPEDIATYNCQQ |
| | | | | CENFPITFGQGTRLEIKR |

### Example 2.74

### Generation of EGFR (Seq. 2) and ErbB3 (Seq. 2) DVD-Igs with Linker Set 3

TABLE 127

| | DVD | Outer | Inner | |
|---|---|---|---|---|
| SEQ | Variable | Variable | Variable | |
| ID | Domain | Domain | Domain | Sequence |
| NO | Name | Name | Name | 12345678901234567890123456789012345 |
| 404 | DVD401H | AB063 | AB033 | EVQLVESGGGLVQPGGSLRLSCAASGFTFSIYSMN |
| | | | | WVRQAPGKGLEWVSYISSSSSTIYYADSVKGRFTI |
| | | | | SRDNAKNSLYLQMNSLRDEDTAVYYCARDRGDFDA |
| | | | | FDIWGQGTMVTVSSASTKGPSVFPLAPQVQLKQSG |
| | | | | PGLVQPSQSLSITCTVSGFSLTNYGVHWVRQSPGK |
| | | | | GLEWLGVIWSGGNTDYNTPFTSRLSINKDNSKSQV |
| | | | | FFKMNSLQSNDTAIYYCARALTYYDYEFAYWGQGT |
| | | | | LVTVSA |
| 405 | DVD401L | AB063 | AB033 | DIQMTQSPSSLSASVGDRVTITCQASQDITNYLNW |
| | | | | YQQKPGKAPKLLIYDASNLETGVPSRFSGSGSGTD |
| | | | | FTFTISSLQPEDIATYNCQQCENFPITFGQGTRLE |
| | | | | IKRTVAAPDILLTQSPVILSVSPGERVSFSCRASQ |
| | | | | SIGTNIHWYQQRTNGSPRLLIKYASESISGIPSRF |
| | | | | SGSGSGTDFTLSINSVESEDIADYYCQQNNNWPTT |
| | | | | FGAGTKLELKR |
| 406 | DVD402H | AB033 | AB063 | QVQLKQSGPGLVQPSQSLSITCTVSGFSLTNYGVH |
| | | | | WVRQSPGKGLEWLGVIWSGGNTDYNTPFTSRLSIN |
| | | | | KDNSKSQVFFKMNSLQSNDTAIYYCARALTYYDYE |
| | | | | FAYWGQGTLVTVSAASTKGPSVFPLAPEVQLVESG |
| | | | | GGLVQPGGSLRLSCAASGFTFSIYSMNWVRQAPGK |
| | | | | GLEWVSYISSSSSTIYYADSVKGRFTISRDNAKNS |
| | | | | LYLQMNSLRDEDTAVYYCARDRGDFDAFDIWGQGT |
| | | | | MVTVSS |
| 407 | DVD402L | AB033 | AB063 | DILLTQSPVILSVSPGERVSFSCRASQSIGTNIHW |
| | | | | YQQRTNGSPRLLIKYASESISGIPSRFSGSGSGTD |
| | | | | FTLSINSVESEDIADYYCQQNNNWPTTFGAGTKLE |
| | | | | LKRTVAAPDIQMTQSPSSLSASVGDRVTITCQASQ |
| | | | | DITNYLNWYQQKPGKAPKLLIYDASNLETGVPSRF |
| | | | | SGSGSGTDFTFTISSLQPEDIATYNCQQCENFPIT |
| | | | | FGQGTRLEIKR |

### Example 2.75

### Generation of EGFR (Seq. 2) and ErbB3 (Seq. 2) DVD-Igs with Linker Set 4

TABLE 128

| | DVD | Outer | Inner | |
|---|---|---|---|---|
| SEQ | Variable | Variable | Variable | |
| ID | Domain | Domain | Domain | Sequence |
| NO | Name | Name | Name | 12345678901234567890123456789012345 |
| 408 | DVD405H | AB063 | AB033 | EVQLVESGGGLVQPGGSLRLSCAASGFTFSIYSMN |
| | | | | WVRQAPGKGLEWVSYISSSSSTIYYADSVKGRFTI |
| | | | | SRDNAKNSLYLQMNSLRDEDTAVYYCARDRGDFDA |
| | | | | FDIWGQGTMVTVSSASTKGPQVQLKQSGPGLVQPS |
| | | | | QSLSITCTVSGFSLTNYGVHWVRQSPGKGLEWLGV |
| | | | | IWSGGNTDYNTPFTSRLSINKDNSKSQVFFKMNSL |
| | | | | QSNDTAIYYCARALTYYDYEFAYWGQGTLVTVSA |
| 409 | DVD405L | AB063 | AB033 | DIQMTQSPSSLSASVGDRVTITCQASQDITNYLNW |
| | | | | YQQKPGKAPKLLIYDASNLETGVPSRFSGSGSGTD |
| | | | | FTFTISSLQPEDIATYNCQQCENFPITFGQGTRLE |
| | | | | IKRTVAAPSVFIFPPDILLTQSPVILSVSPGERVS |
| | | | | FSCRASQSIGTNIHWYQQRTNGSPRLLIKYASESI |
| | | | | SGIPSRFSGSGSGTDFTLSINSVESEDIADYYCQQ |
| | | | | NNNWPTTFGAGTKLELKR |
| 410 | DVD406H | AB033 | AB063 | QVQLKQSGPGLVQPSQSLSITCTVSGFSLTNYGVH |
| | | | | WVRQSPGKGLEWLGVIWSGGNTDYNTPFTSRLSIN |
| | | | | KDNSKSQVFFKMNSLQSNDTAIYYCARALTYYDYE |
| | | | | FAYWGQGTLVTVSAASTKGPEVQLVESGGGLVQPG |
| | | | | GSLRLSCAASGFTFSIYSMNWVRQAPGKGLEWVSY |
| | | | | ISSSSSTIYYADSVKGRFTISRDNAKNSLYLQMNS |
| | | | | LRDEDTAVYYCARDRGDFDAFDIWGQGTMVTVSS |
| 411 | DVD406L | AB033 | AB063 | DILLTQSPVILSVSPGERVSFSCRASQSIGTNIHW |
| | | | | YQQRTNGSPRLLIKYASESISGIPSRFSGSGSGTD |
| | | | | FTLSINSVESEDIADYYCQQNNNWPTTFGAGTKLE |
| | | | | LKRTVAAPSVFIFPPDIQMTQSPSSLSASVGDRVT |
| | | | | ITCQASQDITNYLNWYQQKPGKAPKLLIYDASNLE |
| | | | | TGVPSRFSGSGSGTDFTFTISSLQPEDIATYNCQQ |
| | | | | CENFPITFGQGTRLEIKR |

### Example 2.76

### Generation of EGFR (Seq. 1) and ErbB3 (Seq. 2) DVD-Igs

TABLE 129

| | DVD | Outer | Inner | |
|---|---|---|---|---|
| SEQ | Variable | Variable | Variable | |
| ID | Domain | Domain | Domain | Sequence |
| NO | Name | Name | Name | 12345678901234567890123456789012345 |
| 412 | DVD307H | AB063VH | AB003VH | EVQLVESGGGLVQPGGSLRLSCAASGFTFSIYSMN |
| | | | | WVRQAPGKGLEWVSYISSSSSTIYYADSVKGRFTI |
| | | | | SRDNAKNSLYLQMNSLRDEDTAVYYCARDRGDFDA |
| | | | | FDIWGQGTMVTVSSASTKGPQVQLQESGPGLVKPS |
| | | | | ETLSLTCTVSGGSVSSGDYYWTWIRQSPGKGLEWI |
| | | | | GHIYYSGNTNYNPSLKSRLTISIDTSKTQFSLKLS |
| | | | | SVTAADTAIYYCVRDRVTGAFDIWGQGTMVTVSS |
| 413 | DVD307L | AB063VL | AB003VL | DIQMTQSPSSLSASVGDRVTITCQASQDITNYLNW |
| | | | | YQQKPGKAPKLLIYDASNLETGVPSRFSGSGSGTD |
| | | | | FTFTISSLQPEDIATYNCQQCENFPITFGQGTRLE |
| | | | | IKRTVAAPDIQMTQSPSSLSASVGDRVTITCQASQ |
| | | | | DISNYLNWYQQKPGKAPKLLIYDASNLETGVPSRF |
| | | | | SGSGSGTDFTFTISSLQPEDIATYFCQHFDHLPLA |
| | | | | FGGGTKVEIKR |
| 414 | DVD308H | AB003VH | AB063VH | QVQLQESGPGLVKPSETLSLTCTVSGGSVSSGDYY |
| | | | | WTWIRQSPGKGLEWIGHIYYSGNTNYNPSLKSRLT |
| | | | | ISIDTSKTQFSLKLSSVTAADTAIYYCVRDRVTGA |
| | | | | FDIWGQGTMVTVSSASTKGPEVQLVESGGGLVQPG |
| | | | | GSLRLSCAASGFTFSIYSMNWVRQAPGKGLEWVSY |
| | | | | ISSSSSTIYYADSVKGRFTISRDNAKNSLYLQMNS |
| | | | | LRDEDTAVYYCARDRGDFDAFDIWGQGTMVTVSS |
| 415 | DVD308L | AB003VL | AB063VL | DIQMTQSPSSLSASVGDRVTITCQASQDISNYLNW |
| | | | | YQQKPGKAPKLLIYDASNLETGVPSRFSGSGSGTD |
| | | | | FTFTISSLQPEDIATYFCQHFDHLPLAFGGGTKVE |
| | | | | IKRTVAAPDIQMTQSPSSLSASVGDRVTITCQASQ |
| | | | | DITNYLNWYQQKPGKAPKLLIYDASNLETGVPSRF |
| | | | | SGSGSGTDFTFTISSLQPEDIATYNCQQCENFPIT |
| | | | | FGQGTRLEIKR |

### Example 2.77

### Generation of HGF (Seq. 1) and ErbB3 (Seq. 2) DVD-Igs

TABLE 130

| | DVD | Outer | Inner | |
|---|---|---|---|---|
| SEQ | Variable | Variable | Variable | |
| ID | Domain | Domain | Domain | Sequence |
| NO | Name | Name | Name | 12345678901234567890123456789012345 |
| 416 | DVD309H | AB063VH | AB012VH | EVQLVESGGGLVQPGGSLRLSCAASGFTFSIYSMN |
| | | | | WVRQAPGKGLEWVSYISSSSSTIYYADSVKGRFTI |
| | | | | SRDNAKNSLYLQMNSLRDEDTAVYYCARDRGDFDA |
| | | | | FDIWGQGTMVTVSSASTKGPQVQLVESGGGLVKPG |
| | | | | GSLRLSCAASGFTFSDYYMSWIRQAPGKGLEWVSY |
| | | | | ISSSGSTIYYADSVKGRFTISRDNAKNSLYLQMNS |
| | | | | LRAEDTAVYYCARDEYNSGWYVLFDYWGQGTLVTV |
| | | | | SS |
| 417 | DVD309L | AB063VL | AB012VL | DIQMTQSPSSLSASVGDRVTITCQASQDITNYLNW |
| | | | | YQQKPGKAPKLLIYDASNLETGVPSRFSGSGSGTD |
| | | | | FTFTISSLQPEDIATYNCQQCENFPITFGQGTRLE |
| | | | | IKRTVAAPDIQMTQSPSSVSASVGDRVTITCRASQ |
| | | | | GISSWLAWYQQKPGKAPNLLIYEASSLQSGVPSRF |
| | | | | GGSGSGTDFTLTISSLQPEDFATYYCQQANGFPWT |
| | | | | FGQGTKVEIKR |
| 418 | DVD310H | AB012VH | AB063VH | QVQLVESGGGLVKPGGSLRLSCAASGFTFSDYYMS |
| | | | | WIRQAPGKGLEWVSYISSSGSTIYYADSVKGRFTI |
| | | | | SRDNAKNSLYLQMNSLRAEDTAVYYCARDEYNSGW |
| | | | | YVLFDYWGQGTLVTVSSASTKGPEVQLVESGGGLV |
| | | | | QPGGSLRLSCAASGFTFSIYSMNWVRQAPGKGLEW |
| | | | | VSYISSSSSTIYYADSVKGRFTISRDNAKNSLYLQ |
| | | | | MNSLRDEDTAVYYCARDRGDFDAFDIWGQGTMVTV |
| | | | | SS |
| 419 | DVD310L | AB012VL | AB063VL | DIQMTQSPSSVSASVGDRVTITCRASQGISSWLAW |
| | | | | YQQKPGKAPNLLIYEASSLQSGVPSRFGGSGSGTD |
| | | | | FTLTISSLQPEDFATYYCQQANGFPWTFGQGTKVE |
| | | | | IKRTVAAPDIQMTQSPSSLSASVGDRVTITCQASQ |
| | | | | DITNYLNWYQQKPGKAPKLLIYDASNLETGVPSRF |
| | | | | SGSGSGTDFTFTISSLQPEDIATYNCQQCENFPIT |
| | | | | FGQGTRLEIKR |

### Example 2.78

### Generation of VEGF (Seq. 1) and DLL4 (Seq. 2) DVD-Igs with Linker Set 1

TABLE 131

| | DVD | Outer | Inner | |
|---|---|---|---|---|
| SEQ | Variable | Variable | Variable | |
| ID | Domain | Domain | Domain | Sequence |
| NO | Name | Name | Name | 12345678901234567890123456789012345 |
| 420 | DVD441H | AB069 | AB014 | QVQLVQSGAEVKKPGASVKISCKASGYSFTAYYIH |
| | | | | WVKQAPGQGLEWIGYISSYNGATNYNQKFKGRVTF |
| | | | | TTDTSTSTAYMELRSLRSDDTAVYYCARDYDYDVG |
| | | | | MDYWGQGTLVTVSSASTKGPEVQLVESGGGLVQPG |
| | | | | GSLRLSCAASGYTFTNYGMNWVRQAPGKGLEWVGW |
| | | | | INTYTGEPTYAADFKRRFTFSLDTSKSTAYLQMNS |
| | | | | LRAEDTAVYYCAKYPHYYGSSHWYFDVWGQGTLVT |
| | | | | VSS |
| 421 | DVD441L | AB069 | AB014 | DIVMTQSPDSLAVSLGERATISCRASESVDNYGIS |
| | | | | FMKWFQQKPGQPPKLLIYAASNQGSGVPDRFSGSG |
| | | | | SGTDFTLTISSLQAEDVAVYYCQQSKEVPWTFGGG |
| | | | | TKVEIKRTVAAPDIQMTQSPSSLSASVGDRVTITC |
| | | | | SASQDISNYLNWYQQKPGKAPKVLIYFTSSLHSGV |
| | | | | PSRFSGSGSGTDFTLTISSLQPEDFATYYCQQYST |
| | | | | VPWTFGQGTKVEIKR |
| 422 | DVD442H | AB014 | AB069 | EVQLVESGGGLVQPGGSLRLSCAASGYTFTNYGMN |
| | | | | WVRQAPGKGLEWVGWINTYTGEPTYAADFKRRFTF |
| | | | | SLDTSKSTAYLQMNSLRAEDTAVYYCAKYPHYYGS |
| | | | | SHWYFDVWGQGTLVTVSSASTKGPQVQLVQSGAEV |
| | | | | KKPGASVKISCKASGYSFTAYYIHWVKQAPGQGLE |
| | | | | WIGYISSYNGATNYNQKFKGRVTFTTDTSTSTAYM |
| | | | | ELRSLRSDDTAVYYCARDYDYDVGMDYWGQGTLVT |
| | | | | VSS |
| 423 | DVD442L | AB014 | AB069 | DIQMTQSPSSLSASVGDRVTITCSASQDISNYLNW |
| | | | | YQQKPGKAPKVLIYFTSSLHSGVPSRFSGSGSGTD |
| | | | | FTLTISSLQPEDFATYYCQQYSTVPWTFGQGTKVE |
| | | | | IKRTVAAPDIVMTQSPDSLAVSLGERATISCRASE |
| | | | | SVDNYGISFMKWFQQKPGQPPKLLIYAASNQGSGV |
| | | | | PDRFSGSGSGTDFTLTISSLQAEDVAVYYCQQSKE |
| | | | | VPWTFGGGTKVEIKR |

### Example 2.79

### Generation of VEGF (Seq. 1) and DLL4 (Seq. 2) DVD-Igs with Linker Set 2

TABLE 132

| | DVD | Outer | Inner | |
|---|---|---|---|---|
| SEQ | Variable | Variable | Variable | |
| ID | Domain | Domain | Domain | Sequence |
| NO | Name | Name | Name | 12345678901234567890123456789012345 |
| 424 | DVD447H | AB069 | AB014 | QVQLVQSGAEVKKPGASVKISCKASGYSFTAYYIH |
| | | | | WVKQAPGQGLEWIGYISSYNGATNYNQKFKGRVTF |
| | | | | TTDTSTSTAYMELRSLRSDDTAVYYCARDYDYDVG |
| | | | | MDYWGQGTLVTVSSASTKGPSVFPLAPEVQLVESG |
| | | | | GGLVQPGGSLRLSCAASGYTFTNYGMNWVRQAPGK |
| | | | | GLEWVGWINTYTGEPTYAADFKRRFTFSLDTSKST |
| | | | | AYLQMNSLRAEDTAVYYCAKYPHYYGSSHWYFDVW |
| | | | | GQGTLVTVSS |
| 425 | DVD447L | AB069 | AB014 | DIVMTQSPDSLAVSLGERATISCRASESVDNYGIS |
| | | | | FMKWFQQKPGQPPKLLIYAASNQGSGVPDRFSGSG |
| | | | | SGTDFTLTISSLQAEDVAVYYCQQSKEVPWTFGGG |
| | | | | TKVEIKRTVAAPSVFIFPPDIQMTQSPSSLSASVG |
| | | | | DRVTITCSASQDISNYLNWYQQKPGKAPKVLIYFT |
| | | | | SSLHSGVPSRFSGSGSGTDFTLTISSLQPEDFATY |
| | | | | YCQQYSTVPWTFGQGTKVEIKR |
| 426 | DVD448H | AB014 | AB069 | EVQLVESGGGLVQPGGSLRLSCAASGYTFTNYGMN |
| | | | | WVRQAPGKGLEWVGWINTYTGEPTYAADFKRRFTF |
| | | | | SLDTSKSTAYLQMNSLRAEDTAVYYCAKYPHYYGS |
| | | | | SHWYFDVWGQGTLVTVSSASTKGPSVFPLAPQVQL |
| | | | | VQSGAEVKKPGASVKISCKASGYSFTAYYIHWVKQ |
| | | | | APGQGLEWIGYISSYNGATNYNQKFKGRVTFTTDT |
| | | | | STSTAYMELRSLRSDDTAVYYCARDYDYDVGMDYW |
| | | | | GQGTLVTVSS |
| 427 | DVD448L | AB014 | AB069 | DIQMTQSPSSLSASVGDRVTITCSASQDISNYLNW |
| | | | | YQQKPGKAPKVLIYFTSSLHSGVPSRFSGSGSGTD |
| | | | | FTLTISSLQPEDFATYYCQQYSTVPWTFGQGTKVE |
| | | | | IKRTVAAPSVFIFPPDIVMTQSPDSLAVSLGERAT |
| | | | | ISCRASESVDNYGISFMKWFQQKPGQPPKLLIYAA |
| | | | | SNQGSGVPDRFSGSGSGTDFTLTISSLQAEDVAVY |
| | | | | YCQQSKEVPWTFGGGTKVEIKR |

### Example 2.80

### Generation of VEGF (Seq. 1) and DLL4 (Seq. 2) DVD-Igs with Linker Set 3

TABLE 133

| | DVD | Outer | Inner | |
|---|---|---|---|---|
| SEQ | Variable | Variable | Variable | |
| ID | Domain | Domain | Domain | Sequence |
| NO | Name | Name | Name | 12345678901234567890123456789012345 |
| 428 | DVD453H | AB069 | AB014 | QVQLVQSGAEVKKPGASVKISCKASGYSFTAYYIH |
| | | | | WVKQAPGQGLEWIGYISSYNGATNYNQKFKGRVTF |
| | | | | TTDTSTSTAYMELRSLRSDDTAVYYCARDYDYDVG |
| | | | | MDYWGQGTLVTVSSASTKGPSVFPLAPEVQLVESG |
| | | | | GGLVQPGGSLRLSCAASGYTFTNYGMNWVRQAPGK |
| | | | | GLEWVGWINTYTGEPTYAADFKRRFTFSLDTSKST |
| | | | | AYLQMNSLRAEDTAVYYCAKYPHYYGSSHWYFDVW |
| | | | | GQGTLVTVSS |
| 429 | DVD453L | AB069 | AB014 | DIVMTQSPDSLAVSLGERATISCRASESVDNYGIS |
| | | | | FMKWFQQKPGQPPKLLIYAASNQGSGVPDRFSGSG |
| | | | | SGTDFTLTISSLQAEDVAVYYCQQSKEVPWTFGGG |
| | | | | TKVEIKRTVAAPDIQMTQSPSSLSASVGDRVTITC |
| | | | | SASQDISNYLNWYQQKPGKAPKVLIYFTSSLHSGV |
| | | | | PSRFSGSGSGTDFTLTISSLQPEDFATYYCQQYST |
| | | | | VPWTFGQGTKVEIKR |
| 430 | DVD454H | AB014 | AB069 | EVQLVESGGGLVQPGGSLRLSCAASGYTFTNYGMN |
| | | | | WVRQAPGKGLEWVGWINTYTGEPTYAADFKRRFTF |
| | | | | SLDTSKSTAYLQMNSLRAEDTAVYYCAKYPHYYGS |
| | | | | SHWYFDVWGQGTLVTVSSASTKGPSVFPLAPQVQL |
| | | | | VQSGAEVKKPGASVKISCKASGYSFTAYYIHWVKQ |
| | | | | APGQGLEWIGYISSYNGATNYNQKFKGRVTFTTDT |
| | | | | STSTAYMELRSLRSDDTAVYYCARDYDYDVGMDYW |
| | | | | GQGTLVTVSS |
| 431 | DVD454L | AB014 | AB069 | DIQMTQSPSSLSASVGDRVTITCSASQDISNYLNW |
| | | | | YQQKPGKAPKVLIYFTSSLHSGVPSRFSGSGSGTD |
| | | | | FTLTISSLQPEDFATYYCQQYSTVPWTFGQGTKVE |
| | | | | IKRTVAAPDIVMTQSPDSLAVSLGERATISCRASE |
| | | | | SVDNYGISFMKWFQQKPGQPPKLLIYAASNQGSGV |
| | | | | PDRFSGSGSGTDFTLTISSLQAEDVAVYYCQQSKE |
| | | | | VPWTFGGGTKVEIKR |

### Example 2.81

### Generation of VEGF (Seq. 1) and DLL4 (Seq. 2) DVD-Igs with Linker Set 4

TABLE 134

| | DVD | Outer | Inner | |
|---|---|---|---|---|
| SEQ | Variable | Variable | Variable | |
| ID | Domain | Domain | Domain | Sequence |
| NO | Name | Name | Name | 12345678901234567890123456789012345 |
| 432 | DVD459H | AB069 | AB014 | QVQLVQSGAEVKKPGASVKISCKASGYSFTAYYTH |
| | | | | WVKQAPGQGLEWIGYISSYNGATNYNQKFKGRVTF |
| | | | | TTDTSTSTAYMELRSLRSDDTAVYYCARDYDYDVG |
| | | | | MDYWGQGTLVTVSSASTKGPEVQLVESGGGLVQPG |
| | | | | GSLRLSCAASGYTFTNYGMNWVRQAPGKGLEWVGW |
| | | | | INTYTGEPTYAADFKRRFTFSLDTSKSTAYLQMNS |
| | | | | LRAEDTAVYYCAKYPHYYGSSHWYFDVWGQGTLVT |
| | | | | VSS |
| 433 | DVD459L | AB069 | AB014 | DIVMTQSPDSLAVSLGERATISCRASESVDNYGIS |
| | | | | FMKWFQQKPGQPPKLLIYAASNQGSGVPDRFSGSG |
| | | | | SGTDFTLTISSLQAEDVAVYYCQQSKEVPWTFGGG |
| | | | | TKVEIKRTVAAPSVFIFPPDIQMTQSPSSLSASVG |
| | | | | DRVTITCSASQDISNYLNWYQQKPGKAPKVLIYFT |
| | | | | SSLHSGVPSRFSGSGSGTDFTLTISSLQPEDFATY |
| | | | | YCQQYSTVPWTFGQGTKVEIKR |
| 434 | DVD460H | AB014 | AB069 | EVQLVESGGGLVQPGGSLRLSCAASGYTFTNYGMN |
| | | | | WVRQAPGKGLEWVGWINTYTGEPTYAADFKRRFTF |
| | | | | SLDTSKSTAYLQMNSLRAEDTAVYYCAKYPHYYGS |
| | | | | SHWYFDVWGQGTLVTVSSASTKGPQVQLVQSGAEV |
| | | | | KKPGASVKISCKASGYSFTAYYIHWVKQAPGQGLE |
| | | | | WIGYISSYNGATNYNQKFKGRVTFTTDTSTSTAYM |
| | | | | ELRSLRSDDTAVYYCARDYDYDVGMDYWGQGTLVT |
| | | | | VSS |
| 435 | DVD460L | AB014 | AB069 | DIQMTQSPSSLSASVGDRVTITCSASQDISNYLNW |
| | | | | YQQKPGKAPKVLIYFTSSLHSGVPSRFSGSGSGTD |
| | | | | FTLTISSLQPEDFATYYCQQYSTVPWTFGQGTKVE |
| | | | | IKRTVAAPSVFIFPPDIVMTQSPDSLAVSLGERAT |
| | | | | ISCRASESVDNYGISFMKWFQQKPGQPPKLLIYAA |
| | | | | SNQGSGVPDRFSGSGSGTDFTLTISSLQAEDVAVY |
| | | | | YCQQSKEVPWTFGGGTKVEIKR |

### Example 2.82

### Generation of VEGF (Seq. 2) and DLL4 (Seq. 2) DVD-Igs with Linker Set 1

TABLE 135

| | DVD | Outer | Inner | |
|---|---|---|---|---|
| SEQ | Variable | Variable | Variable | |
| ID | Domain | Domain | Domain | Sequence |
| NO | Name | Name | Name | 12345678901234567890123456789012345 |
| 436 | DVD443H | AB069 | AB070 | QVQLVQSGAEVKKPGASVKISCKASGYSFTAYYIH |
| | | | | WVKQAPGQGLEWIGYISSYNGATNYNQKFKGRVTF |
| | | | | TTDTSTSTAYMELRSLRSDDTAVYYCARDYDYDVG |
| | | | | MDYWGQGTLVTVSSASTKGPEVQLVESGGGLVQPG |
| | | | | GSLRLSCAASGFTISDYWIHWVRQAPGKGLEWVAG |
| | | | | ITPAGGYTYYADSVKGRFTISADTSKNTAYLQMNS |
| | | | | LRAEDTAVYYCARFVFFLPYAMDYWGQGTLVTVSS |
| 437 | DVD443L | AB069 | AB070 | DIVMTQSPDSLAVSLGERATISCRASESVDNYGIS |
| | | | | FMKWFQQKPGQPPKLLIYAASNQGSGVPDRFSGSG |
| | | | | SGTDFTLTISSLQAEDVAVYYCQQSKEVPWTFGGG |
| | | | | TKVEIKRTVAAPDIQMTQSPSSLSASVGDRVTITC |
| | | | | RASQDVSTAVAWYQQKPGKAPKLLIYSASFLYSGV |
| | | | | PSRFSGSGSGTDFTLTISSLQPEDFATYYCQQSYT |
| | | | | TPPTFGQGTKVEIKR |
| 438 | DVD444H | AB070 | AB069 | EVQLVESGGGLVQPGGSLRLSCAASGFTISDYWIH |
| | | | | WVRQAPGKGLEWVAGITPAGGYTYYADSVKGRFTI |
| | | | | SADTSKNTAYLQMNSLRAEDTAVYYCARFVFFLPY |
| | | | | AMDYWGQGTLVTVSSASTKGPQVQLVQSGAEVKKP |
| | | | | GASVKISCKASGYSFTAYYIHWVKQAPGQGLEWIG |
| | | | | YISSYNGATNYNQKFKGRVTFTTDTSTSTAYMELR |
| | | | | SLRSDDTAVYYCARDYDYDVGMDYWGQGTLVTVSS |
| 439 | DVD444L | AB070 | AB069 | DIQMTQSPSSLSASVGDRVTITCRASQDVSTAVAW |
| | | | | YQQKPGKAPKLLIYSASFLYSGVPSRFSGSGSGTD |
| | | | | FTLTISSLQPEDFATYYCQQSYTTPPTFGQGTKVE |
| | | | | IKRTVAAPDIVMTQSPDSLAVSLGERATISCRASE |
| | | | | SVDNYGISFMKWFQQKPGQPPKLLIYAASNQGSGV |
| | | | | PDRFSGSGSGTDFTLTISSLQAEDVAVYYCQQSKE |
| | | | | VPWTFGGGTKVEIKR |

### Example 2.83

### Generation of VEGF (Seq. 2) and DLL4 (Seq. 2) DVD-Igs with Linker Set 2

TABLE 136

| | DVD | Outer | Inner | |
|---|---|---|---|---|
| SEQ | Variable | Variable | Variable | |
| ID | Domain | Domain | Domain | Sequence |
| NO | Name | Name | Name | 12345678901234567890123456789012345 |
| 440 | DVD449H | AB069 | AB070 | QVQLVQSGAEVKKPGASVKISCKASGYSFTAYYIH |
| | | | | WVKQAPGQGLEWIGYISSYNGATNYNQKFKGRVTF |
| | | | | TTDTSTSTAYMELRSLRSDDTAVYYCARDYDYDVG |
| | | | | MDYWGQGTLVTVSSASTKGPSVFPLAPEVQLVESG |
| | | | | GGLVQPGGSLRLSCAASGFTISDYWIHWVRQAPGK |
| | | | | GLEWVAGITPAGGYTYYADSVKGRFTISADTSKNT |
| | | | | AYLQMNSLRAEDTAVYYCARFVFFLPYAMDYWGQG |
| | | | | TLVTVSS |
| 441 | DVD449L | AB069 | AB070 | DIVMTQSPDSLAVSLGERATISCRASESVDNYGIS |
| | | | | FMKWFQQKPGQPPKLLIYAASNQGSGVPDRFSGSG |
| | | | | SGTDFTLTISSLQAEDVAVYYCQQSKEVPWTFGGG |
| | | | | TKVEIKRTVAAPSVFIFPPDIQMTQSPSSLSASVG |
| | | | | DRVTITCRASQDVSTAVAWYQQKPGKAPKLLIYSA |
| | | | | SFLYSGVPSRFSGSGSGTDFTLTISSLQPEDFATY |
| | | | | YCQQSYTTPPTFGQGTKVEIKR |
| 442 | DVD450H | AB070 | AB069 | EVQLVESGGGLVQPGGSLRLSCAASGFTISDYWIH |
| | | | | WVRQAPGKGLEWVAGITPAGGYTYYADSVKGRFTI |
| | | | | SADTSKNTAYLQMNSLRAEDTAVYYCARFVFFLPY |
| | | | | AMDYWGQGTLVTVSSASTKGPSVFPLAPQVQLVQS |
| | | | | GAEVKKPGASVKISCKASGYSFTAYYIHWVKQAPG |
| | | | | QGLEWIGYISSYNGATNYNQKFKGRVTFTTDTSTS |
| | | | | TAYMELRSLRSDDTAVYYCARDYDYDVGMDYWGQG |
| | | | | TLVTVSS |
| 443 | DVD450L | AB070 | AB069 | DIQMTQSPSSLSASVGDRVTITCRASQDVSTAVAW |
| | | | | YQQKPGKAPKLLIYSASFLYSGVPSRFSGSGSGTD |
| | | | | FTLTISSLQPEDFATYYCQQSYTTPPTFGQGTKVE |
| | | | | IKRTVAAPSVFIFPPDIVMTQSPDSLAVSLGERAT |
| | | | | ISCRASESVDNYGISFMKWFQQKPGQPPKLLIYAA |
| | | | | SNQGSGVPDRFSGSGSGTDFTLTISSLQAEDVAVY |
| | | | | YCQQSKEVPWTFGGGTKVEIKR |

### Example 2.84

### Generation of VEGF (Seq. 2) and DLL4 (Seq. 2) DVD-Igs with Linker Set 3

TABLE 137

| | DVD | Outer | Inner | |
|---|---|---|---|---|
| SEQ | Variable | Variable | Variable | |
| ID | Domain | Domain | Domain | Sequence |
| NO | Name | Name | Name | 12345678901234567890123456789012345 |
| 444 | DVD455H | AB069 | AB070 | QVQLVQSGAEVKKPGASVKISCKASGYSFTAYYIH |
| | | | | WVKQAPGQGLEWIGYISSYNGATNYNQKFKGRVTF |
| | | | | TTDTSTSTAYMELRSLRSDDTAVYYCARDYDYDVG |
| | | | | MDYWGQGTLVTVSSASTKGPSVFPLAPEVQLVESG |
| | | | | GGLVQPGGSLRLSCAASGFTISDYWIHWVRQAPGK |
| | | | | GLEWVAGITPAGGYTYYADSVKGRFTISADTSKNT |
| | | | | AYLQMNSLRAEDTAVYYCARFVFFLPYAMDYWGQG |
| | | | | TLVTVSS |
| 445 | DVD455L | AB069 | AB070 | DIVMTQSPDSLAVSLGERATISCRASESVDNYGIS |
| | | | | FMKWFQQKPGQPPKLLIYAASNQGSGVPDRFSGSG |
| | | | | SGTDFTLTISSLQAEDVAVYYCQQSKEVPWTFGGG |
| | | | | TKVEIKRTVAAPDIQMTQSPSSLSASVGDRVTITC |
| | | | | RASQDVSTAVAWYQQKPGKAPKLLIYSASFLYSGV |
| | | | | PSRFSGSGSGTDFTLTISSLQPEDFATYYCQQSYT |
| | | | | TPPTFGQGTKVEIKR |
| 446 | DVD456H | AB070 | AB069 | EVQLVESGGGLVQPGGSLRLSCAASGFTISDYWIH |
| | | | | WVRQAPGKGLEWVAGITPAGGYTYYADSVKGRFTI |
| | | | | SADTSKNTAYLQMNSLRAEDTAVYYCARFVFFLPY |
| | | | | AMDYWGQGTLVTVSSASTKGPSVFPLAPQVQLVQS |
| | | | | GAEVKKPGASVKISCKASGYSFTAYYIHWVKQAPG |
| | | | | QGLEWIGYISSYNGATNYNQKFKGRVTFTTDTSTS |
| | | | | TAYMELRSLRSDDTAVYYCARDYDYDVGMDYWGQG |
| | | | | TLVTVSS |
| 447 | DVD456L | AB070 | AB069 | DIQMTQSPSSLSASVGDRVTITCRASQDVSTAVAW |
| | | | | YQQKPGKAPKLLIYSASFLYSGVPSRFSGSGSGTD |
| | | | | FTLTISSLQPEDFATYYCQQSYTTPPTFGQGTKVE |
| | | | | IKRTVAAPDIVMTQSPDSLAVSLGERATISCRASE |
| | | | | SVDNYGISFMKWFQQKPGQPPKLLIYAASNQGSGV |
| | | | | PDRFSGSGSGTDFTLTISSLQAEDVAVYYCQQSKE |
| | | | | VPWTFGGGTKVEIKR |

### Example 2.85

### Generation of VEGF (Seq. 2) and DLL4 (Seq. 2) DVD-Igs with Linker Set 4

TABLE 138

| | DVD | Outer | Inner | |
|---|---|---|---|---|
| SEQ | Variable | Variable | Variable | |
| ID | Domain | Domain | Domain | Sequence |
| NO | Name | Name | Name | 12345678901234567890123456789012345 |
| 448 | DVD461H | AB069 | AB070 | QVQLVQSGAEVKKPGASVKISCKASGYSFTAYYIH |
| | | | | WVKQAPGQGLEWIGYISSYNGATNYNQKFKGRVTF |
| | | | | TTDTSTSTAYMELRSLRSDDTAVYYCARDYDYDVG |
| | | | | MDYWGQGTLVTVSSASTKGPEVQLVESGGGLVQPG |
| | | | | GSLRLSCAASGFTISDYWIHWVRQAPGKGLEWVAG |
| | | | | ITPAGGYTYYADSVKGRFTISADTSKNTAYLQMNS |
| | | | | LRAEDTAVYYCARFVFFLPYAMDYWGQGTLVTVSS |
| 449 | DVD461L | AB069 | AB070 | DIVMTQSPDSLAVSLGERATISCRASESVDNYGIS |
| | | | | FMKWFQQKPGQPPKLLIYAASNQGSGVPDRFSGSG |
| | | | | SGTDFTLTISSLQAEDVAVYYCQQSKEVPWTFGGG |
| | | | | TKVEIKRTVAAPSVFIFPPDIQMTQSPSSLSASVG |
| | | | | DRVTITCRASQDVSTAVAWYQQKPGKAPKLLIYSA |
| | | | | SFLYSGVPSRFSGSGSGTDFTLTISSLQPEDFATY |
| | | | | YCQQSYTTPPTFGQGTKVEIKR |
| 450 | DVD462H | AB070 | AB069 | EVQLVESGGGLVQPGGSLRLSCAASGFTISDYWIH |
| | | | | WVRQAPGKGLEWVAGITPAGGYTYYADSVKGRFTI |
| | | | | SADTSKNTAYLQMNSLRAEDTAVYYCARFVFFLPY |
| | | | | AMDYWGQGTLVTVSSASTKGPQVQLVQSGAEVKKP |
| | | | | GASVKISCKASGYSFTAYYIHWVKQAPGQGLEWIG |
| | | | | YISSYNGATNYNQKFKGRVTFTTDTSTSTAYMELR |
| | | | | SLRSDDTAVYYCARDYDYDVGMDYWGQGTLVTVSS |
| 451 | DVD462L | AB070 | AB069 | DIQMTQSPSSLSASVGDRVTITCRASQDVSTAVAW |
| | | | | YQQKPGKAPKLLIYSASFLYSGVPSRFSGSGSGTD |
| | | | | FTLTISSLQPEDFATYYCQQSYTTPPTFGQGTKVE |
| | | | | IKRTVAAPSVFIFPPDIVMTQSPDSLAVSLGERAT |
| | | | | ISCRASESVDNYGISFMKWFQQKPGQPPKLLIYAA |
| | | | | SNQGSGVPDRFSGSGSGTDFTLTISSLQAEDVAVY |
| | | | | YCQQSKEVPWTFGGGTKVEIKR |

### Example 2.86

### Generation of VEGF (Seq. 3) and DLL4 (Seq. 2) DVD-Igs with Linker Set 1

TABLE 139

| | DVD | Outer | Inner | |
|---|---|---|---|---|
| SEQ | Variable | Variable | Variable | |
| ID | Domain | Domain | Domain | Sequence |
| NO | Name | Name | Name | 12345678901234567890123456789012345 |
| 452 | DVD445H | AB069 | AB071 | QVQLVQSGAEVKKPGASVKISCKASGYSFTAYYIH |
| | | | | WVKQAPGQGLEWIGYISSYNGATNYNQKFKGRVTF |
| | | | | TTDTSTSTAYMELRSLRSDDTAVYYCARDYDYDVG |
| | | | | MDYWGQGTLVTVSSASTKGPEVQLVESGGGLVQPG |
| | | | | GSLRLSCAASGFTINASWIHWVRQAPGKGLEWVGA |
| | | | | IYPYSGYTNYADSVKGRFTISADTSKNTAYLQMNS |
| | | | | LRAEDTAVYYCARWGHSTSPWAMDYWGQGTLVTVS |
| | | | | S |
| 453 | DVD445L | AB069 | AB071 | DIVMTQSPDSLAVSLGERATISCRASESVDNYGIS |
| | | | | FMKWFQQKPGQPPKLLIYAASNQGSGVPDRFSGSG |
| | | | | SGTDFTLTISSLQAEDVAVYYCQQSKEVPWTFGGG |
| | | | | TKVEIKRTVAAPDIQMTQSPSSLSASVGDRVTITC |
| | | | | RASQVIRRSLAWYQQKPGKAPKLLIYAASNLASGV |
| | | | | PSRFSGSGSGTDFTLTISSLQPEDFATYYCQQSNT |
| | | | | SPLTFGQGTKVEIKR |
| 454 | DVD446H | AB071 | AB069 | EVQLVESGGGLVQPGGSLRLSCAASGFTINASWIH |
| | | | | WVRQAPGKGLEWVGAIYPYSGYTNYADSVKGRFTI |
| | | | | SADTSKNTAYLQMNSLRAEDTAVYYCARWGHSTSP |
| | | | | WAMDYWGQGTLVTVSSASTKGPQVQLVQSGAEVKK |
| | | | | PGASVKISCKASGYSFTAYYIHWVKQAPGQGLEWI |
| | | | | GYISSYNGATNYNQKFKGRVTFTTDTSTSTAYMEL |
| | | | | RSLRSDDTAVYYCARDYDYDVGMDYWGQGTLVTVS |
| | | | | S |
| 455 | DVD446L | AB071 | AB069 | DIQMTQSPSSLSASVGDRVTITCRASQVIRRSLAW |
| | | | | YQQKPGKAPKLLIYAASNLASGVPSRFSGSGSGTD |
| | | | | FTLTISSLQPEDFATYYCQQSNTSPLTFGQGTKVE |
| | | | | IKRTVAAPDIVMTQSPDSLAVSLGERATISCRASE |
| | | | | SVDNYGISFMKWFQQKPGQPPKLLIYAASNQGSGV |
| | | | | PDRFSGSGSGTDFTLTISSLQAEDVAVYYCQQSKE |
| | | | | VPWTFGGGTKVEIKR |

### Example 2.87

### Generation of VEGF (Seq. 3) and DLL4 (Seq. 2) DVD-Igs with Linker Set 2

TABLE 140

| | DVD | Outer | Inner | |
|---|---|---|---|---|
| SEQ | Variable | Variable | Variable | |
| ID | Domain | Domain | Domain | Sequence |
| NO | Name | Name | Name | 12345678901234567890123456789012345 |

| | | | | |
|---|---|---|---|---|
| 456 | DVD451H | AB069 | AB071 | QVQLVQSGAEVKKPGASVKISCKASGYSFTAYYIH |
| | | | | WVKQAPGQGLEWIGYISSYNGATNYNQKFKGRVTF |
| | | | | TTDTSTSTAYMELRSLRSDDTAVYYCARDYDYDVG |
| | | | | MDYWGQGTLVTVSSASTKGPSVFPLAPEVQLVESG |
| | | | | GGLVQPGGSLRLSCAASGFTINASWIHWVRQAPGK |
| | | | | GLEWVGAIYPYSGYTNYADSVKGRFTISADTSKNT |
| | | | | AYLQMNSLRAEDTAVYYCARWGHSTSPWAMDYWGQ |
| | | | | GTLVTVSS |
| 457 | DVD451L | AB069 | AB071 | DIVMTQSPDSLAVSLGERATISCRASESVDNYGIS |
| | | | | FMKWFQQKPGQPPKLLIYAASNQGSGVPDRFSGSG |
| | | | | SGTDFTLTISSLQAEDVAVYYCQQSKEVPWTFGGG |
| | | | | TKVEIKRTVAAPSVFIFPPDIQMTQSPSSLSASVG |
| | | | | DRVTITCRASQVIRRSLAWYQQKPGKAPKLLIYAA |
| | | | | SNLASGVPSRFSGSGSGTDFTLTISSLQPEDFATY |
| | | | | YCQQSNTSPLTFGQGTKVEIKR |
| 458 | DVD452H | AB071 | AB069 | EVQLVESGGGLVQPGGSLRLSCAASGFTINASWIH |
| | | | | WVRQAPGKGLEWVGAIYPYSGYTNYADSVKGRFTI |
| | | | | SADTSKNTAYLQMNSLRAEDTAVYYCARWGHSTSP |
| | | | | WAMDYWGQGTLVTVSSASTKGPSVFPLAPQVQLVQ |
| | | | | SGAEVKKPGASVKISCKASGYSFTAYYIHWVKQAP |
| | | | | GQGLEWIGYISSYNGATNYNQKFKGRVTFTTDTST |
| | | | | STAYMELRSLRSDDTAVYYCARDYDYDVGMDYWGQ |
| | | | | GTLVTVSS |
| 459 | DVD452L | AB071 | AB069 | DIQMTQSPSSLSASVGDRVTITCRASQVIRRSLAW |
| | | | | YQQKPGKAPKLLIYAASNLASGVPSRFSGSGSGTD |
| | | | | FTLTISSLQPEDFATYYCQQSNTSPLTFGQGTKVE |
| | | | | IKRTVAAPSVFIFPPDIVMTQSPDSLAVSLGERAT |
| | | | | ISCRASESVDNYGISFMKWFQQKPGQPPKLLIYAA |
| | | | | SNQGSGVPDRFSGSGSGTDFTLTISSLQAEDVAVY |
| | | | | YCQQSKEVPWTFGGGTKVEIKR |

### Example 2.88

### Generation of VEGF (Seq. 3) and DLL4 (Seq. 2) DVD-Igs with Linker Set 3

TABLE 141

| | DVD | Outer | Inner | |
|---|---|---|---|---|
| SEQ | Variable | Variable | Variable | |
| ID | Domain | Domain | Domain | Sequence |
| NO | Name | Name | Name | 12345678901234567890123456789012345 |

| | | | | |
|---|---|---|---|---|
| 460 | DVD457H | AB069 | AB071 | QVQLVQSGAEVKKPGASVKISCKASGYSFTAYYIH |
| | | | | WVKQAPGQGLEWIGYISSYNGATNYNQKFKGRVTF |
| | | | | TTDTSTSTAYMELRSLRSDDTAVYYCARDYDYDVG |
| | | | | MDYWGQGTLVTVSSASTKGPSVFPLAPEVQLVESG |
| | | | | GGLVQPGGSLRLSCAASGFTINASWIHWVRQAPGK |
| | | | | GLEWVGAIYPYSGYTNYADSVKGRFTISADTSKNT |
| | | | | AYLQMNSLRAEDTAVYYCARWGHSTSPWAMDYWGQ |
| | | | | GTLVTVSS |
| 461 | DVD457L | AB069 | AB071 | DIVMTQSPDSLAVSLGERATISCRASESVDNYGIS |
| | | | | FMKWFQQKPGQPPKLLIYAASNQGSGVPDRFSGSG |
| | | | | SGTDFTLTISSLQAEDVAVYYCQQSKEVPWTFGGG |
| | | | | TKVEIKRTVAAPDIQMTQSPSSLSASVGDRVTITC |
| | | | | RASQVIRRSLAWYQQKPGKAPKLLIYAASNLASGV |
| | | | | PSRFSGSGSGTDFTLTISSLQPEDFATYYCQQSNT |
| | | | | SPLTFGQGTKVEIKR |
| 462 | DVD458H | AB071 | AB069 | EVQLVESGGGLVQPGGSLRLSCAASGFTINASWIH |
| | | | | WVRQAPGKGLEWVGAIYPYSGYTNYADSVKGRFTI |
| | | | | SADTSKNTAYLQMNSLRAEDTAVYYCARWGHSTSP |
| | | | | WAMDYWGQGTLVTVSSASTKGPSVFPLAPQVQLVQ |
| | | | | SGAEVKKPGASVKISCKASGYSFTAYYIHWVKQAP |
| | | | | GQGLEWIGYISSYNGATNYNQKFKGRVTFTTDTST |
| | | | | STAYMELRSLRSDDTAVYYCARDYDYDVGMDYWGQ |
| | | | | GTLVTVSS |
| 463 | DVD458L | AB071 | AB069 | DIQMTQSPSSLSASVGDRVTITCRASQVIRRSLAW |
| | | | | YQQKPGKAPKLLIYAASNLASGVPSRFSGSGSGTD |
| | | | | FTLTISSLQPEDFATYYCQQSNTSPLTFGQGTKVE |
| | | | | IKRTVAAPDIVMTQSPDSLAVSLGERATISCRASE |
| | | | | SVDNYGISFMKWFQQKPGQPPKLLIYAASNQGSGV |
| | | | | PDRFSGSGSGTDFTLTISSLQAEDVAVYYCQQSKE |
| | | | | VPWTFGGGTKVEIKR |

### Example 2.89

### Generation of VEGF (Seq. 3) and DLL4 (Seq. 2) DVD-Igs with Linker Set 4

TABLE 142

| | DVD | Outer | Inner | |
|---|---|---|---|---|
| SEQ | Variable | Variable | Variable | |
| ID | Domain | Domain | Domain | Sequence |
| NO | Name | Name | Name | 12345678901234567890123456789012345 |

| | | | | |
|---|---|---|---|---|
| 464 | DVD463H | AB069 | AB071 | QVQLVQSGAEVKKPGASVKISCKASGYSFTAYYIH |
| | | | | WVKQAPGQGLEWIGYISSYNGATNYNQKFKGRVTF |
| | | | | TTDTSTSTAYMELRSLRSDDTAVYYCARDYDYDVG |
| | | | | MDYWGQGTLVTVSSASTKGPEVQLVESGGGLVQPG |
| | | | | GSLRLSCAASGFTINASWIHWVRQAPGKGLEWVGA |
| | | | | IYPYSGYTNYADSVKGRFTISADTSKNTAYLQMNS |
| | | | | LRAEDTAVYYCARWGHSTSPWAMDYWGQGTLVTVS |
| | | | | S |
| 465 | DVD463L | AB069 | AB071 | DIVMTQSPDSLAVSLGERATISCRASESVDNYGIS |
| | | | | FMKWFQQKPGQPPKLLIYAASNQGSGVPDRFSGSG |
| | | | | SGTDFTLTISSLQAEDVAVYYCQQSKEVPWTFGGG |
| | | | | TKVEIKRTVAAPSVFIFPPDIQMTQSPSSLSASVG |
| | | | | DRVTITCRASQVIRRSLAWYQQKPGKAPKLLIYAA |
| | | | | SNLASGVPSRFSGSGSGTDFTLTISSLQPEDFATY |
| | | | | YCQQSNTSPLTFGQGTKVEIKR |
| 466 | DVD464H | AB071 | AB069 | EVQLVESGGGLVQPGGSLRLSCAASGFTINASWIH |
| | | | | WVRQAPGKGLEWVGAIYPYSGYTNYADSVKGRFTI |
| | | | | SADTSKNTAYLQMNSLRAEDTAVYYCARWGHSTSP |
| | | | | WAMDYWGQGTLVTVSSASTKGPQVQLVQSGAEVKK |
| | | | | PGASVKISCKASGYSFTAYYIHWVKQAPGQGLEWI |
| | | | | GYISSYNGATNYNQKFKGRVTFTTDTSTSTAYMEL |
| | | | | RSLRSDDTAVYYCARDYDYDVGMDYWGQGTLVTVS |
| | | | | S |
| 467 | DVD464L | AB071 | AB069 | DIQMTQSPSSLSASVGDRVTITCRASQVIRRSLAW |
| | | | | YQQKPGKAPKLLIYAASNLASGVPSRFSGSGSGTD |
| | | | | FTLTISSLQPEDFATYYCQQSNTSPLTFGQGTKVE |
| | | | | IKRTVAAPSVFIFPPDIVMTQSPDSLAVSLGERAT |
| | | | | ISCRASESVDNYGISFMKWFQQKPGQPPKLLIYAA |
| | | | | SNQGSGVPDRFSGSGSGTDFTLTISSLQAEDVAVY |
| | | | | YCQQSKEVPWTFGGGTKVEIKR |

### Example 2.90

### Generation of VEGF (Seq. 2) and DLL4 (Seq. 1) DVD-Igs with Linker Set 1

TABLE 143

| | DVD | Outer | Inner | |
|---|---|---|---|---|
| SEQ | Variable | Variable | Variable | |
| ID | Domain | Domain | Domain | Sequence |
| NO | Name | Name | Name | 12345678901234567890123456789012345 |
| 468 | DVD465H | AB015 | AB070 | EVQLVESGGGLVQPGGSLRLSCAASGFTFTDNWIS |
| | | | | WVRQAPGKGLEWVGYISPNSGFTYYADSVKGRFTI |
| | | | | SADTSKNTAYLQMNSLRAEDTAVYYCARDNFGGYF |
| | | | | DYWGQGTLVTVSSASTKGPEVQLVESGGGLVQPGG |
| | | | | SLRLSCAASGFTISDYWIHWVRQAPGKGLEWVAGI |
| | | | | TPAGGYTYYADSVKGRFTISADTSKNTAYLQMNSL |
| | | | | RAEDTAVYYCARFVFFLPYAMDYWGQGTLVTVSS |
| 469 | DVD465L | AB015 | AB070 | DIQMTQSPSSLSASVGDRVTITCRASQDVSTAVAW |
| | | | | YQQKPGKAPKLLIYSASFLYSGVPSRFSGSGSGTD |
| | | | | FTLTISSLQPEDFATTYYCQQSYTGTVTFGQGTKV |
| | | | | EIKRTVAAPDIQMTQSPSSLSASVGDRVTITCRAS |
| | | | | QDVSTAVAWYQQKPGKAPKLLIYSASFLYSGVPSR |
| | | | | FSGSGSGTDFTLTISSLQPEDFATYYCQQSYTTPP |
| | | | | TFGQGTKVEIKR |
| 470 | DVD466H | AB070 | AB015 | EVQLVESGGGLVQPGGSLRLSCAASGFTISDYWIH |
| | | | | WVRQAPGKGLEWVAGITPAGGYTYYADSVKGRFTI |
| | | | | SADTSKNTAYLQMNSLRAEDTAVYYCARFVFFLPY |
| | | | | AMDYWGQGTLVTVSSASTKGPEVQLVESGGGLVQP |
| | | | | GGSLRLSCAASGFTFTDNWISWVRQAPGKGLEWVG |
| | | | | YISPNSGFTYYADSVKGRFTISADTSKNTAYLQMN |
| | | | | SLRAEDTAVYYCARDNFGGYFDYWGQGTLVTVSS |
| 471 | DVD466L | AB070 | AB015 | DIQMTQSPSSLSASVGDRVTITCRASQDVSTAVAW |
| | | | | YQQKPGKAPKLLIYSASFLYSGVPSRFSGSGSGTD |
| | | | | FTLTISSLQPEDFATYYCQQSYTTPPTFGQGTKVE |
| | | | | IKRTVAAPDIQMTQSPSSLSASVGDRVTITCRASQ |
| | | | | DVSTAVAWYQQKPGKAPKLLIYSASFLYSGVPSRF |
| | | | | SGSGSGTDFTLTISSLQPEDFATTYYCQQSYTGTV |
| | | | | TFGQGTKVEIKR |

### Example 2.91

### Generation of VEGF (Seq. 2) and DLL4 (Seq. 1) DVD-Igs with Linker Set 2

TABLE 144

| | DVD | Outer | Inner | |
|---|---|---|---|---|
| SEQ | Variable | Variable | Variable | |
| ID | Domain | Domain | Domain | Sequence |
| NO | Name | Name | Name | 12345678901234567890123456789012345 |
| 472 | DVD471H | AB015 | AB070 | EVQLVESGGGLVQPGGSLRLSCAASGFTFTDNWIS |
| | | | | WVRQAPGKGLEWVGYISPNSGFTYYADSVKGRFTI |
| | | | | SADTSKNTAYLQMNSLRAEDTAVYYCARDNFGGYF |
| | | | | DYWGQGTLVTVSSASTKGPSVFPLAPEVQLVESGG |
| | | | | GLVQPGGSLRLSCAASGFTISDYWIHWVRQAPGKG |
| | | | | LEWVAGITPAGGYTYYADSVKGRFTISADTSKNTA |
| | | | | YLQMNSLRAEDTAVYYCARFVFFLPYAMDYWGQGT |
| | | | | LVTVSS |
| 473 | DVD471L | AB015 | AB070 | DIQMTQSPSSLSASVGDRVTITCRASQDVSTAVAW |
| | | | | YQQKPGKAPKLLIYSASFLYSGVPSRFSGSGSGTD |
| | | | | FTLTISSLQPEDFATTYYCQQSYTGTVTFGQGTKV |
| | | | | EIKRTVAAPSVFIFPPDIQMTQSPSSLSASVGDRV |
| | | | | TITCRASQDVSTAVAWYQQKPGKAPKLLIYSASFL |
| | | | | YSGVPSRFSGSGSGTDFTLTISSLQPEDFATYYCQ |
| | | | | QSYTTPPTFGQGTKVEIKR |
| 474 | DVD472H | AB070 | AB015 | EVQLVESGGGLVQPGGSLRLSCAASGFTISDYWIH |
| | | | | WVRQAPGKGLEWVAGITPAGGYTYYADSVKGRFTI |
| | | | | SADTSKNTAYLQMNSLRAEDTAVYYCARFVFFLPY |
| | | | | AMDYWGQGTLVTVSSASTKGPSVFPLAPEVQLVES |
| | | | | GGGLVQPGGSLRLSCAASGFTFTDNWISWVRQAPG |
| | | | | KGLEWVGYISPNSGFTYYADSVKGRFTISADTSKN |
| | | | | TAYLQMNSLRAEDTAVYYCARDNFGGYFDYWGQGT |
| | | | | LVTVSS |
| 475 | DVD472L | AB070 | AB015 | DIQMTQSPSSLSASVGDRVTITCRASQDVSTAVAW |
| | | | | YQQKPGKAPKLLIYSASFLYSGVPSRFSGSGSGTD |
| | | | | FTLTISSLQPEDFATYYCQQSYTTPPTFGQGTKVE |
| | | | | IKRTVAAPSVFIFPPDIQMTQSPSSLSASVGDRVT |
| | | | | ITCRASQDVSTAVAWYQQKPGKAPKLLIYSASFLY |
| | | | | SGVPSRFSGSGSGTDFTLTISSLQPEDFATTYYCQ |
| | | | | QSYTGTVTFGQGTKVEIKR |

### Example 2.92

### Generation of VEGF (Seq. 2) and DLL4 (Seq. 1) DVD-Igs with Linker Set 3

TABLE 145

| | DVD | Outer | Inner | |
|---|---|---|---|---|
| SEQ | Variable | Variable | Variable | |
| ID | Domain | Domain | Domain | Sequence |
| NO | Name | Name | Name | 12345678901234567890123456789012345 |
| 476 | DVD477H | AB015 | AB070 | EVQLVESGGGLVQPGGSLRLSCAASGFTFTDNWIS |
| | | | | WVRQAPGKGLEWVGYISPNSGFTYYADSVKGRFTI |
| | | | | SADTSKNTAYLQMNSLRAEDTAVYYCARDNFGGYF |
| | | | | DYWGQGTLVTVSSASTKGPSVFPLAPEVQLVESGG |
| | | | | GLVQPGGSLRLSCAASGFTISDYWIHWVRQAPGKG |
| | | | | LEWVAGITPAGGYTYYADSVKGRFTISADTSKNTA |
| | | | | YLQMNSLRAEDTAVYYCARFVFFLPYAMDYWGQGT |
| | | | | LVTVSS |
| 477 | DVD477L | AB015 | AB070 | DIQMTQSPSSLSASVGDRVTITCRASQDVSTAVAW |
| | | | | YQQKPGKAPKLLIYSASFLYSGVPSRFSGSGSGTD |
| | | | | FTLTISSLQPEDFATTYYCQQSYTGTVTFGQGTKV |
| | | | | EIKRTVAAPDIQMTQSPSSLSASVGDRVTITCRAS |
| | | | | QDVSTAVAWYQQKPGKAPKLLIYSASFLYSGVPSR |
| | | | | FSGSGSGTDFTLTISSLQPEDFATYYCQQSYTTPP |
| | | | | TFGQGTKVEIKR |
| 478 | DVD478H | AB070 | AB015 | EVQLVESGGGLVQPGGSLRLSCAASGFTISDYWIH |
| | | | | WVRQAPGKGLEWVAGITPAGGYTYYADSVKGRFTI |
| | | | | SADTSKNTAYLQMNSLRAEDTAVYYCARFVFFLPY |
| | | | | AMDYWGQGTLVTVSSASTKGPSVFPLAPEVQLVES |
| | | | | GGGLVQPGGSLRLSCAASGFTFTDNWISWVRQAPG |
| | | | | KGLEWVGYISPNSGFTYYADSVKGRFTISADTSKN |
| | | | | TAYLQMNSLRAEDTAVYYCARDNFGGYFDYWGQGT |
| | | | | LVTVSS |
| 479 | DVD478L | AB070 | AB015 | DIQMTQSPSSLSASVGDRVTITCRASQDVSTAVAW |
| | | | | YQQKPGKAPKLLIYSASFLYSGVPSRFSGSGSGTD |
| | | | | FTLTISSLQPEDFATYYCQQSYTTPPTFGQGTKVE |
| | | | | IKRTVAAPDIQMTQSPSSLSASVGDRVTITCRASQ |
| | | | | DVSTAVAWYQQKPGKAPKLLIYSASFLYSGVPSRF |
| | | | | SGSGSGTDFTLTISSLQPEDFATTYYCQQSYTGTV |
| | | | | TFGQGTKVEIKR |

### Example 2.93

### Generation of VEGF (Seq. 2) and DLL4 (Seq. 1) DVD-Igs with Linker Set 4

TABLE 146

| | DVD | Outer | Inner | |
|---|---|---|---|---|
| SEQ | Variable | Variable | Variable | |
| ID | Domain | Domain | Domain | Sequence |
| NO | Name | Name | Name | 12345678901234567890123456789012345 |
| 480 | DVD483H | AB015 | AB070 | EVQLVESGGGLVQPGGSLRLSCAASGFTFTDNWIS |
| | | | | WVRQAPGKGLEWVGYISPNSGFTYYADSVKGRFTI |
| | | | | SADTSKNTAYLQMNSLRAEDTAVYYCARDNFGGYF |
| | | | | DYWGQGTLVTVSSASTKGPEVQLVESGGGLVQPGG |
| | | | | SLRLSCAASGFTISDYWIHWVRQAPGKGLEWVAGI |
| | | | | TPAGGYTYYADSVKGRFTISADTSKNTAYLQMNSL |
| | | | | RAEDTAVYYCARFVFFLPYAMDYWGQGTLVTVSS |
| 481 | DVD483L | AB015 | AB070 | DIQMTQSPSSLSASVGDRVTITCRASQDVSTAVAW |
| | | | | YQQKPGKAPKLLIYSASFLYSGVPSRFSGSGSGTD |
| | | | | FTLTISSLQPEDFATTYYCQQSYTGTVTFGQGTKV |
| | | | | EIKRTVAAPSVFIFPPDIQMTQSPSSLSASVGDRV |
| | | | | TITCRASQDVSTAVAWYQQKPGKAPKLLIYSASFL |
| | | | | YSGVPSRFSGSGSGTDFTLTISSLQPEDFATYYCQ |
| | | | | QSYTTPPTFGQGTKVEIKR |
| 482 | DVD484H | AB070 | AB015 | EVQLVESGGGLVQPGGSLRLSCAASGFTISDYWIH |
| | | | | WVRQAPGKGLEWVAGITPAGGYTYYADSVKGRFTI |
| | | | | SADTSKNTAYLQMNSLRAEDTAVYYCARFVFFLPY |
| | | | | AMDYWGQGTLVTVSSASTKGPEVQLVESGGGLVQP |
| | | | | GGSLRLSCAASGFTFTDNWISWVRQAPGKGLEWVG |
| | | | | YISPNSGFTYYADSVKGRFTISADTSKNTAYLQMN |
| | | | | SLRAEDTAVYYCARDNFGGYFDYWGQGTLVTVSS |
| 483 | DVD484L | AB070 | AB015 | DIQMTQSPSSLSASVGDRVTITCRASQDVSTAVAW |
| | | | | YQQKPGKAPKLLIYSASFLYSGVPSRFSGSGSGTD |
| | | | | FTLTISSLQPEDFATYYCQQSYTTPPTFGQGTKVE |
| | | | | IKRTVAAPSVFIFPPDIQMTQSPSSLSASVGDRVT |
| | | | | ITCRASQDVSTAVAWYQQKPGKAPKLLIYSASFLY |
| | | | | SGVPSRFSGSGSGTDFTLTISSLQPEDFATTYYCQ |
| | | | | QSYTGTVTFGQGTKVEIKR |

### Example 2.94

### Generation of VEGF (Seq. 3) and DLL4 (Seq. 1) DVD-Igs with Linker Set 1

TABLE 147

| | DVD | Outer | Inner | |
|---|---|---|---|---|
| SEQ | Variable | Variable | Variable | |
| ID | Domain | Domain | Domain | Sequence |
| NO | Name | Name | Name | 12345678901234567890123456789012345 |
| 484 | DVD467H | AB015 | AB071 | EVQLVESGGGLVQPGGSLRLSCAASGFTFTDNWIS |
| | | | | WVRQAPGKGLEWVGYISPNSGFTYYADSVKGRFTI |
| | | | | SADTSKNTAYLQMNSLRAEDTAVYYCARDNFGGYF |
| | | | | DYWGQGTLVTVSSASTKGPEVQLVESGGGLVQPGG |
| | | | | SLRLSCAASGFTINASWIHWVRQAPGKGLEWVGAI |
| | | | | YPYSGYTNYADSVKGRFTISADTSKNTAYLQMNSL |
| | | | | RAEDTAVYYCARWGHSTSPWAMDYWGQGTLVTVSS |
| 485 | DVD467L | AB015 | AB071 | DIQMTQSPSSLSASVGDRVTITCRASQDVSTAVAW |
| | | | | YQQKPGKAPKLLIYSASFLYSGVPSRFSGSGSGTD |
| | | | | FTLTISSLQPEDFATTYYCQQSYTGTVTFGQGTKV |
| | | | | EIKRTVAAPDIQMTQSPSSLSASVGDRVTITCRAS |
| | | | | QVIRRSLAWYQQKPGKAPKLLIYAASNLASGVPSR |
| | | | | FSGSGSGTDFTLTISSLQPEDFATYYCQQSNTSPL |
| | | | | TFGQGTKVEIKR |
| 486 | DVD468H | AB071 | AB015 | EVQLVESGGGLVQPGGSLRLSCAASGFTINASWIH |
| | | | | WVRQAPGKGLEWVGAIYPYSGYTNYADSVKGRFTI |
| | | | | SADTSKNTAYLQMNSLRAEDTAVYYCARWGHSTSP |
| | | | | WAMDYWGQGTLVTVSSASTKGPEVQLVESGGGLVQ |
| | | | | PGGSLRLSCAASGFTFTDNWISWVRQAPGKGLEWV |
| | | | | GYISPNSGFTYYADSVKGRFTISADTSKNTAYLQM |
| | | | | NSLRAEDTAVYYCARDNFGGYFDYWGQGTLVTVSS |
| 487 | DVD468L | AB071 | AB015 | DIQMTQSPSSLSASVGDRVTITCRASQVIRRSLAW |
| | | | | YQQKPGKAPKLLIYAASNLASGVPSRFSGSGSGTD |
| | | | | FTLTISSLQPEDFATYYCQQSNTSPLTFGQGTKVE |
| | | | | IKRTVAAPDIQMTQSPSSLSASVGDRVTITCRASQ |
| | | | | DVSTAVAWYQQKPGKAPKLLIYSASFLYSGVPSRF |
| | | | | SGSGSGTDFTLTISSLQPEDFATTYYCQQSYTGTV |
| | | | | TFGQGTKVEIKR |

### Example 2.95

### Generation of VEGF (Seq. 3) and DLL4 (Seq. 1) DVD-Igs with Linker Set 2

TABLE 148

| | DVD | Outer | Inner | |
|---|---|---|---|---|
| SEQ | Variable | Variable | Variable | |
| ID | Domain | Domain | Domain | Sequence |
| NO | Name | Name | Name | 12345678901234567890123456789012345 |
| 488 | DVD473H | AB015 | AB071 | EVQLVESGGGLVQPGGSLRLSCAASGFTFTDNWIS |
| | | | | WVRQAPGKGLEWVGYISPNSGFTYYADSVKGRFTI |
| | | | | SADTSKNTAYLQMNSLRAEDTAVYYCARDNFGGYF |
| | | | | DYWGQGTLVTVSSASTKGPSVFPLAPEVQLVESGG |
| | | | | GLVQPGGSLRLSCAASGFTINASWIHWVRQAPGKG |
| | | | | LEWVGAIYPYSGYTNYADSVKGRFTISADTSKNTA |
| | | | | YLQMNSLRAEDTAVYYCARWGHSTSPWAMDYWGQG |
| | | | | TLVTVSS |
| 489 | DVD473L | AB015 | AB071 | DIQMTQSPSSLSASVGDRVTITCRASQDVSTAVAW |
| | | | | YQQKPGKAPKLLIYSASFLYSGVPSRFSGSGSGTD |
| | | | | FTLTISSLQPEDFATTYYCQQSYTGTVTFGQGTKV |
| | | | | EIKRTVAAPSVFIFPPDIQMTQSPSSLSASVGDRV |
| | | | | TITCRASQVIRRSLAWYQQKPGKAPKLLIYAASNL |
| | | | | ASGVPSRFSGSGSGTDFTLTISSLQPEDFATYYCQ |
| | | | | QSNTSPLTFGQGTKVEIKR |
| 490 | DVD474H | AB071 | AB015 | EVQLVESGGGLVQPGGSLRLSCAASGFTINASWIH |
| | | | | WVRQAPGKGLEWVGAIYPYSGYTNYADSVKGRFTI |
| | | | | SADTSKNTAYLQMNSLRAEDTAVYYCARWGHSTSP |
| | | | | WAMDYWGQGTLVTVSSASTKGPSVFPLAPEVQLVE |
| | | | | SGGGLVQPGGSLRLSCAASGFTFTDNWISWVRQAP |
| | | | | GKGLEWVGYISPNSGFTYYADSVKGRFTISADTSK |
| | | | | NTAYLQMNSLRAEDTAVYYCARDNFGGYFDYWGQG |
| | | | | TLVTVSS |
| 491 | DVD474L | AB071 | AB015 | DIQMTQSPSSLSASVGDRVTITCRASQVIRRSLAW |
| | | | | YQQKPGKAPKLLIYAASNLASGVPSRFSGSGSGTD |
| | | | | FTLTISSLQPEDFATYYCQQSNTSPLTFGQGTKVE |
| | | | | IKRTVAAPSVFIFPPDIQMTQSPSSLSASVGDRVT |
| | | | | ITCRASQDVSTAVAWYQQKPGKAPKLLIYSASFLY |
| | | | | SGVPSRFSGSGSGTDFTLTISSLQPEDFATTYYCQ |
| | | | | QSYTGTVTFGQGTKVEIKR |

### Example 2.96

### Generation of VEGF (Seq. 3) and DLL4 (Seq. 1) DVD-Igs with Linker Set 3

TABLE 149

| | DVD | Outer | Inner | |
|---|---|---|---|---|
| SEQ | Variable | Variable | Variable | |
| ID | Domain | Domain | Domain | Sequence |
| NO | Name | Name | Name | 12345678901234567890123456789012345 |

| | | | | |
|---|---|---|---|---|
| 492 | DVD479H | AB015 | AB071 | EVQLVESGGGLVQPGGSLRLSCAASGFTFTDNWIS |
| | | | | WVRQAPGKGLEWVGYISPNSGFTYYADSVKGRFTI |
| | | | | SADTSKNTAYLQMNSLRAEDTAVYYCARDNFGGYF |
| | | | | DYWGQGTLVTVSSASTKGPSVFPLAPEVQLVESGG |
| | | | | GLVQPGGSLRLSCAASGFTINASWIHWVRQAPGKG |
| | | | | LEWVGAIYPYSGYTNYADSVKGRFTISADTSKNTA |
| | | | | YLQMNSLRAEDTAVYYCARWGHSTSPWAMDYWGQG |
| | | | | TLVTVSS |
| 493 | DVD479L | AB015 | AB071 | DIQMTQSPSSLSASVGDRVTITCRASQDVSTAVAW |
| | | | | YQQKPGKAPKLLIYSASFLYSGVPSRFSGSGSGTD |
| | | | | FTLTISSLQPEDFATTYYCQQSYTGTVTFGQGTKV |
| | | | | EIKRTVAAPDIQMTQSPSSLSASVGDRVTITCRAS |
| | | | | QVIRRSLAWYQQKPGKAPKLLIYAASNLASGVPSR |
| | | | | FSGSGSGTDFTLTISSLQPEDFATYYCQQSNTSPL |
| | | | | TFGQGTKVEIKR |
| 494 | DVD480H | AB071 | AB015 | EVQLVESGGGLVQPGGSLRLSCAASGFTINASWIH |
| | | | | WVRQAPGKGLEWVGAIYPYSGYTNYADSVKGRFTI |
| | | | | SADTSKNTAYLQMNSLRAEDTAVYYCARWGHSTSP |
| | | | | WAMDYWGQGTLVTVSSASTKGPSVFPLAPEVQLVE |
| | | | | SGGGLVQPGGSLRLSCAASGFTFTDNWISWVRQAP |
| | | | | GKGLEWVGYISPNSGFTYYADSVKGRFTISADTSK |
| | | | | NTAYLQMNSLRAEDTAVYYCARDNFGGYFDYWGQG |
| | | | | TLVTVSS |
| 495 | DVD480L | AB071 | AB015 | DIQMTQSPSSLSASVGDRVTITCRASQVIRRSLAW |
| | | | | YQQKPGKAPKLLIYAASNLASGVPSRFSGSGSGTD |
| | | | | FTLTISSLQPEDFATYYCQQSNTSPLTFGQGTKVE |
| | | | | IKRTVAAPDIQMTQSPSSLSASVGDRVTITCRASQ |
| | | | | DVSTAVAWYQQKPGKAPKLLIYSASFLYSGVPSRF |
| | | | | SGSGSGTDFTLTISSLQPEDFATTYYCQQSYTGTV |
| | | | | TFGQGTKVEIKR |

### Example 2.97

### Generation of VEGF (Seq. 3) and DLL4 (Seq. 1) DVD-Igs with Linker Set 4

TABLE 150

| | DVD | Outer | Inner | |
|---|---|---|---|---|
| SEQ | Variable | Variable | Variable | |
| ID | Domain | Domain | Domain | Sequence |
| NO | Name | Name | Name | 12345678901234567890123456789012345 |
| 496 | DVD485H | AB015 | AB071 | EVQLVESGGGLVQPGGSLRLSCAASGFTFTDNWIS |
| | | | | WVRQAPGKGLEWVGYISPNSGFTYYADSVKGRFTI |
| | | | | SADTSKNTAYLQMNSLRAEDTAVYYCARDNFGGYF |
| | | | | DYWGQGTLVTVSSASTKGPEVQLVESGGGLVQPGG |
| | | | | SLRLSCAASGFTINASWIHWVRQAPGKGLEWVGAI |
| | | | | YPYSGYTNYADSVKGRFTISADTSKNTAYLQMNSL |
| | | | | RAEDTAVYYCARWGHSTSPWAMDYWGQGTLVTVSS |
| 497 | DVD485L | AB015 | AB071 | DIQMTQSPSSLSASVGDRVTITCRASQDVSTAVAW |
| | | | | YQQKPGKAPKLLIYSASFLYSGVPSRFSGSGSGTD |
| | | | | FTLTISSLQPEDFATTYYCQQSYTGTVTFGQGTKV |
| | | | | EIKRTVAAPSVFIFPPDIQMTQSPSSLSASVGDRV |
| | | | | TITCRASQVIRRSLAWYQQKPGKAPKLLIYAASNL |
| | | | | ASGVPSRFSGSGSGTDFTLTISSLQPEDFATYYCQ |
| | | | | QSNTSPLTFGQGTKVEIKR |
| 498 | DVD486H | AB071 | AB015 | EVQLVESGGGLVQPGGSLRLSCAASGFTINASWIH |
| | | | | WVRQAPGKGLEWVGAIYPYSGYTNYADSVKGRFTI |
| | | | | SADTSKNTAYLQMNSLRAEDTAVYYCARWGHSTSP |
| | | | | WAMDYWGQGTLVTVSSASTKGPEVQLVESGGGLVQ |
| | | | | PGGSLRLSCAASGFTFTDNWISWVRQAPGKGLEWV |
| | | | | GYISPNSGFTYYADSVKGRFTISADTSKNTAYLQM |
| | | | | NSLRAEDTAVYYCARDNFGGYFDYWGQGTLVTVSS |
| 499 | DVD486L | AB071 | AB015 | DIQMTQSPSSLSASVGDRVTITCRASQVIRRSLAW |
| | | | | YQQKPGKAPKLLIYAASNLASGVPSRFSGSGSGTD |
| | | | | FTLTISSLQPEDFATYYCQQSNTSPLTFGQGTKVE |
| | | | | IKRTVAAPSVFIFPPDIQMTQSPSSLSASVGDRVT |
| | | | | ITCRASQDVSTAVAWYQQKPGKAPKLLIYSASFLY |
| | | | | SGVPSRFSGSGSGTDFTLTISSLQPEDFATTYYCQ |
| | | | | QSYTGTVTFGQGTKVEIKR |

### Example 2.98

### Generation of VEGF (Seq. 1) and DLL4 (Seq. 1) DVD-Igs with Linker Set 1

TABLE 151

| | DVD | Outer | Inner | |
|---|---|---|---|---|
| SEQ | Variable | Variable | Variable | |
| ID | Domain | Domain | Domain | Sequence |
| NO | Name | Name | Name | 12345678901234567890123456789012345 |

| | | | | |
|---|---|---|---|---|
| 500 | DVD469H | AB015 | AB014 | EVQLVESGGGLVQPGGSLRLSCAASGFTFTDNWIS |
| | | | | WVRQAPGKGLEWVGYISPNSGFTYYADSVKGRFTI |
| | | | | SADTSKNTAYLQMNSLRAEDTAVYYCARDNFGGYF |
| | | | | DYWGQGTLVTVSSASTKGPSVFPLAPEVQLVESGG |
| | | | | GLVQPGGSLRLSCAASGYTFTNYGMNWVRQAPGKG |
| | | | | LEWVGWINTYTGEPTYAADFKRRFTFSLDTSKSTA |
| | | | | YLQMNSLRAEDTAVYYCAKYPHYYGSSHWYFDVWG |
| | | | | QGTLVTVSS |
| 501 | DVD469L | AB015 | AB014 | DIQMTQSPSSLSASVGDRVTITCRASQDVSTAVAW |
| | | | | YQQKPGKAPKLLIYSASFLYSGVPSRFSGSGSGTD |
| | | | | FTLTISSLQPEDFATTYYCQQSYTGTVTFGQGTKV |
| | | | | EIKRTVAAPSVFIFPPDIQMTQSPSSLSASVGDRV |
| | | | | TITCSASQDISNYLNWYQQKPGKAPKVLIYFTSSL |
| | | | | HSGVPSRFSGSGSGTDFTLTISSLQPEDFATYYCQ |
| | | | | QYSTVPWTFGQGTKVEIKR |
| 502 | DVD470H | AB014 | AB015 | EVQLVESGGGLVQPGGSLRLSCAASGYTFTNYGMN |
| | | | | WVRQAPGKGLEWVGWINTYTGEPTYAADFKRRFTF |
| | | | | SLDTSKSTAYLQMNSLRAEDTAVYYCAKYPHYYGS |
| | | | | SHWYFDVWGQGTLVTVSSASTKGPSVFPLAPEVQL |
| | | | | VESGGGLVQPGGSLRLSCAASGFTFTDNWISWVRQ |
| | | | | APGKGLEWVGYISPNSGFTYYADSVKGRFTISADT |
| | | | | SKNTAYLQMNSLRAEDTAVYYCARDNFGGYFDYWG |
| | | | | QGTLVTVSS |
| 503 | DVD470L | AB014 | AB015 | DIQMTQSPSSLSASVGDRVTITCSASQDISNYLNW |
| | | | | YQQKPGKAPKVLIYFTSSLHSGVPSRFSGSGSGTD |
| | | | | FTLTISSLQPEDFATYYCQQYSTVPWTFGQGTKVE |
| | | | | IKRTVAAPSVFIFPPDIQMTQSPSSLSASVGDRVT |
| | | | | ITCRASQDVSTAVAWYQQKPGKAPKLLIYSASFLY |
| | | | | SGVPSRFSGSGSGTDFTLTISSLQPEDFATTYYCQ |
| | | | | QSYTGTVTFGQGTKVEIKR |

### Example 2.99

### Generation of VEGF (Seq. 1) and DLL4 (Seq. 1) DVD-Igs with Linker Set 2

TABLE 152

| | DVD | Outer | Inner | |
|---|---|---|---|---|
| SEQ | Variable | Variable | Variable | |
| ID | Domain | Domain | Domain | Sequence |
| NO | Name | Name | Name | 12345678901234567890123456789012345 |
| 504 | DVD475H | AB015 | AB014 | EVQLVESGGGLVQPGGSLRLSCAASGFTFTDNWIS |
| | | | | WVRQAPGKGLEWVGYISPNSGFTYYADSVKGRFTI |
| | | | | SADTSKNTAYLQMNSLRAEDTAVYYCARDNFGGYF |
| | | | | DYWGQGTLVTVSSASTKGPSVFPLAPEVQLVESGG |
| | | | | GLVQPGGSLRLSCAASGYTFTNYGMNWVRQAPGKG |
| | | | | LEWVGWINTYTGEPTYAADFKRRFTFSLDTSKSTA |
| | | | | YLQMNSLRAEDTAVYYCAKYPHYYGSSHWYFDVWG |
| | | | | QGTLVTVSS |
| 505 | DVD475L | AB015 | AB014 | DIQMTQSPSSLSASVGDRVTITCRASQDVSTAVAW |
| | | | | YQQKPGKAPKLLIYSASFLYSGVPSRFSGSGSGTD |
| | | | | FTLTISSLQPEDFATTYYCQQSYTGTVTFGQGTKV |
| | | | | EIKRTVAAPDIQMTQSPSSLSASVGDRVTITCSAS |
| | | | | QDISNYLNWYQQKPGKAPKVLIYFTSSLHSGVPSR |
| | | | | FSGSGSGTDFTLTISSLQPEDFATYYCQQYSTVPW |
| | | | | TFGQGTKVEIKR |
| 506 | DVD476H | AB014 | AB015 | EVQLVESGGGLVQPGGSLRLSCAASGYTFTNYGMN |
| | | | | WVRQAPGKGLEWVGWINTYTGEPTYAADFKRRFTF |
| | | | | SLDTSKSTAYLQMNSLRAEDTAVYYCAKYPHYYGS |
| | | | | SHWYFDVWGQGTLVTVSSASTKGPSVFPLAPEVQL |
| | | | | VESGGGLVQPGGSLRLSCAASGFTFTDNWISWVRQ |
| | | | | APGKGLEWVGYISPNSGFTYYADSVKGRFTISADT |
| | | | | SKNTAYLQMNSLRAEDTAVYYCARDNFGGYFDYWG |
| | | | | QGTLVTVSS |
| 507 | DVD476L | AB014 | AB015 | DIQMTQSPSSLSASVGDRVTITCSASQDISNYLNW |
| | | | | YQQKPGKAPKVLIYFTSSLHSGVPSRFSGSGSGTD |
| | | | | FTLTISSLQPEDFATYYCQQYSTVPWTFGQGTKVE |
| | | | | IKRTVAAPDIQMTQSPSSLSASVGDRVTITCRASQ |
| | | | | DVSTAVAWYQQKPGKAPKLLIYSASFLYSGVPSRF |
| | | | | SGSGSGTDFTLTISSLQPEDFATTYYCQQSYTGTV |
| | | | | TFGQGTKVEIKR |

### Example 2.100

### Generation of VEGF (Seq. 1) and DLL4 (Seq. 1) DVD-Igs with Linker Set 3

TABLE 153

| | DVD | Outer | Inner | |
|---|---|---|---|---|
| SEQ | Variable | Variable | Variable | |
| ID | Domain | Domain | Domain | Sequence |
| NO | Name | Name | Name | 12345678901234567890123456789012345 |
| 508 | DVD481H | AB015 | AB014 | EVQLVESGGGLVQPGGSLRLSCAASGFTFTDNWIS |
| | | | | WVRQAPGKGLEWVGYISPNSGFTYYADSVKGRFTI |
| | | | | SADTSKNTAYLQMNSLRAEDTAVYYCARDNFGGYF |
| | | | | DYWGQGTLVTVSSASTKGPEVQLVESGGGLVQPGG |
| | | | | SLRLSCAASGYTFTNYGMNWVRQAPGKGLEWVGWI |
| | | | | NTYTGEPTYAADFKRRFTFSLDTSKSTAYLQMNSL |
| | | | | RAEDTAVYYCAKYPHYYGSSHWYFDVWGQGTLVTV |
| | | | | SS |
| 509 | DVD481L | AB015 | AB014 | DIQMTQSPSSLSASVGDRVTITCRASQDVSTAVAW |
| | | | | YQQKPGKAPKLLIYSASFLYSGVPSRFSGSGSGTD |
| | | | | FTLTISSLQPEDFATTYYCQQSYTGTVTFGQGTKV |
| | | | | EIKRTVAAPSVFIFPPDIQMTQSPSSLSASVGDRV |
| | | | | TITCSASQDISNYLNWYQQKPGKAPKVLIYFTSSL |
| | | | | HSGVPSRFSGSGSGTDFTLTISSLQPEDFATYYCQ |
| | | | | QYSTVPWTFGQGTKVEIKR |
| 510 | DVD482H | AB014 | AB015 | EVQLVESGGGLVQPGGSLRLSCAASGYTFTNYGMN |
| | | | | WVRQAPGKGLEWVGWINTYTGEPTYAADFKRRFTF |
| | | | | SLDTSKSTAYLQMNSLRAEDTAVYYCAKYPHYYGS |
| | | | | SHWYFDVWGQGTLVTVSSASTKGPEVQLVESGGGL |
| | | | | VQPGGSLRLSCAASGFTFTDNWISWVRQAPGKGLE |
| | | | | WVGYISPNSGFTYYADSVKGRFTISADTSKNTAYL |
| | | | | QMNSLRAEDTAVYYCARDNFGGYFDYWGQGTLVTV |
| | | | | SS |
| 511 | DVD482L | AB014 | AB015 | DIQMTQSPSSLSASVGDRVTITCSASQDISNYLNW |
| | | | | YQQKPGKAPKVLIYFTSSLHSGVPSRFSGSGSGTD |
| | | | | FTLTISSLQPEDFATYYCQQYSTVPWTFGQGTKVE |
| | | | | IKRTVAAPSVFIFPPDIQMTQSPSSLSASVGDRVT |
| | | | | ITCRASQDVSTAVAWYQQKPGKAPKLLIYSASFLY |
| | | | | SGVPSRFSGSGSGTDFTLTISSLQPEDFATTYYCQ |
| | | | | QSYTGTVTFGQGTKVEIKR |

### Example 2.101

### Generation of VEGF (Seq. 1) and DLL4 (Seq. 3) DVD-Igs with Linker Set 1

TABLE 154

| | DVD | Outer | Inner | |
|---|---|---|---|---|
| SEQ | Variable | Variable | Variable | |
| ID | Domain | Domain | Domain | Sequence |
| NO | Name | Name | Name | 12345678901234567890123456789012345 |
| 512 | DVD487H | AB072 | AB014 | EVQLQQSGPELVKPGASVKMSCKASGYTFTSYVIN |
| | | | | WVKQKPGQGLEWIGLINPYNDGTKYNEKFKVKATL |
| | | | | TSDKSSSTAYMELSSLTSEDSAVYYCASYYYGSRY |
| | | | | YFDYWGQGTTLTVSSASTKGPEVQLVESGGGLVQP |
| | | | | GGSLRLSCAASGYTFTNYGMNWVRQAPGKGLEWVG |
| | | | | WINTYTGEPTYAADFKRRFTFSLDTSKSTAYLQMN |
| | | | | SLRAEDTAVYYCAKYPHYYGSSHWYFDVWGQGTLV |
| | | | | TVSS |
| 513 | DVD487L | AB072 | AB014 | DIQMTQSSSYLSVSLGGRVTITCKASDHINNWLAW |
| | | | | YQQKPGNAPRLLISGATSLETGVPSRFSGSGSGKD |
| | | | | YTLSITSLQTEDVATYYCQQYWSIPLTFGAGTKLE |
| | | | | LKRTVAAPDIQMTQSPSSLSASVGDRVTITCSASQ |
| | | | | DISNYLNWYQQKPGKAPKVLIYFTSSLHSGVPSRF |
| | | | | SGSGSGTDFTLTISSLQPEDFATYYCQQYSTVPWT |
| | | | | FGQGTKVEIKR |
| 514 | DVD488H | AB014 | AB072 | EVQLVESGGGLVQPGGSLRLSCAASGYTFTNYGMN |
| | | | | WVRQAPGKGLEWVGWINTYTGEPTYAADFKRRFTF |
| | | | | SLDTSKSTAYLQMNSLRAEDTAVYYCAKYPHYYGS |
| | | | | SHWYFDVWGQGTLVTVSSASTKGPEVQLQQSGPEL |
| | | | | VKPGASVKMSCKASGYTFTSYVINWVKQKPGQGLE |
| | | | | WIGLINPYNDGTKYNEKFKVKATLTSDKSSSTAYM |
| | | | | ELSSLTSEDSAVYYCASYYYGSRYYFDYWGQGTTL |
| | | | | TVSS |
| 515 | DBD488L | AB014 | AB072 | DIQMTQSPSSLSASVGDRVTITCSASQDISNYLNW |
| | | | | YQQKPGKAPKVLIYFTSSLHSGVPSRFSGSGSGTD |
| | | | | FTLTISSLQPEDFATYYCQQYSTVPWTFGQGTKVE |
| | | | | IKRTVAAPDIQMTQSSSYLSVSLGGRVTITCKASD |
| | | | | HINNWLAWYQQKPGNAPRLLISGATSLETGVPSRF |
| | | | | SGSGSGKDYTLSITSLQTEDVATYYCQQYWSIPLT |
| | | | | FGAGTKLELKR |

### Example 2.102

### Generation of VEGF (Seq. 1) and DLL4 (Seq. 3) DVD-Igs with Linker Set 2

TABLE 155

| | DVD | Outer | Inner | |
|---|---|---|---|---|
| SEQ | Variable | Variable | Variable | |
| ID | Domain | Domain | Domain | Sequence |
| NO | Name | Name | Name | 12345678901234567890123456789012345 |
| 516 | DVD493H | AB072 | AB014 | EVQLQQSGPELVKPGASVKMSCKASGYTFTSYVIN |
| | | | | WVKQKPGQGLEWIGLINPYNDGTKYNEKFKVKATL |
| | | | | TSDKSSSTAYMELSSLTSEDSAVYYCASYYYGSRY |
| | | | | YFDYWGQGTTLTVSSASTKGPSVFPLAPEVQLVES |
| | | | | GGGLVQPGGSLRLSCAASGYTFTNYGMNWVRQAPG |
| | | | | KGLEWVGWINTYTGEPTYAADFKRRFTFSLDTSKS |
| | | | | TAYLQMNSLRAEDTAVYYCAKYPHYYGSSHWYFDV |
| | | | | WGQGTLVTVSS |
| 517 | DVD493L | AB072 | AB014 | DIQMTQSSSYLSVSLGGRVTITCKASDHINNWLAW |
| | | | | YQQKPGNAPRLLISGATSLETGVPSRFSGSGSGKD |
| | | | | YTLSITSLQTEDVATYYCQQYWSIPLTFGAGTKLE |
| | | | | LKRTVAAPSVFIFPPDIQMTQSPSSLSASVGDRVT |
| | | | | ITCSASQDISNYLNWYQQKPGKAPKVLIYFTSSLH |
| | | | | SGVPSRFSGSGSGTDFTLTISSLQPEDFATYYCQQ |
| | | | | YSTVPWTFGQGTKVEIKR |
| 518 | DVD494H | AB014 | AB072 | EVQLVESGGGLVQPGGSLRLSCAASGYTFTNYGMN |
| | | | | WVRQAPGKGLEWVGWINTYTGEPTYAADFKRRFTF |
| | | | | SLDTSKSTAYLQMNSLRAEDTAVYYCAKYPHYYGS |
| | | | | SHWYFDVWGQGTLVTVSSASTKGPSVFPLAPEVQL |
| | | | | QQSGPELVKPGASVKMSCKASGYTFTSYVINWVKQ |
| | | | | KPGQGLEWIGLINPYNDGTKYNEKFKVKATLTSDK |
| | | | | SSSTAYMELSSLTSEDSAVYYCASYYYGSRYYFDY |
| | | | | WGQGTTLTVSS |
| 519 | DVD494L | AB014 | AB072 | DIQMTQSPSSLSASVGDRVTITCSASQDISNYLNW |
| | | | | YQQKPGKAPKVLIYFTSSLHSGVPSRFSGSGSGTD |
| | | | | FTLTISSLQPEDFATYYCQQYSTVPWTFGQGTKVE |
| | | | | IKRTVAAPSVFIFPPDIQMTQSSSYLSVSLGGRVT |
| | | | | ITCKASDHINNWLAWYQQKPGNAPRLLISGATSLE |
| | | | | TGVPSRFSGSGSGKDYTLSITSLQTEDVATYYCQQ |
| | | | | YWSIPLTFGAGTKLELKR |

### Example 2.103

### Generation of VEGF (Seq. 1) and DLL4 (Seq. 3) DVD-Igs with Linker Set 3

TABLE 156

| | DVD | Outer | Inner | |
|---|---|---|---|---|
| SEQ | Variable | Variable | Variable | |
| ID | Domain | Domain | Domain | Sequence |
| NO | Name | Name | Name | 12345678901234567890123456789012345 |
| 520 | DVD499H | AB072 | AB014 | EVQLQQSGPELVKPGASVKMSCKASGYTFTSYVIN |
| | | | | WVKQKPGQGLEWIGLINPYNDGTKYNEKFKVKATL |
| | | | | TSDKSSSTAYMELSSLTSEDSAVYYCASYYYGSRY |
| | | | | YFDYWGQGTTLTVSSASTKGPSVFPLAPEVQLVES |
| | | | | GGGLVQPGGSLRLSCAASGYTFTNYGMNWVRQAPG |
| | | | | KGLEWVGWINTYTGEPTYAADFKRRFTFSLDTSKS |
| | | | | TAYLQMNSLRAEDTAVYYCAKYPHYYGSSHWYFDV |
| | | | | WGQGTLVTVSS |
| 521 | DVD499L | AB072 | AB014 | DIQMTQSSSYLSVSLGGRVTITCKASDHINNWLAW |
| | | | | YQQKPGNAPRLLISGATSLETGVPSRFSGSGSGKD |
| | | | | YTLSITSLQTEDVATYYCQQYWSIPLTFGAGTKLE |
| | | | | LKRTVAAPDIQMTQSPSSLSASVGDRVTITCSASQ |
| | | | | DISNYLNWYQQKPGKAPKVLIYFTSSLHSGVPSRF |
| | | | | SGSGSGTDFTLTISSLQPEDFATYYCQQYSTVPWT |
| | | | | FGQGTKVEIKR |
| 522 | DVD500H | AB014 | AB072 | EVQLVESGGGLVQPGGSLRLSCAASGYTFTNYGMN |
| | | | | WVRQAPGKGLEWVGWINTYTGEPTYAADFKRRFTF |
| | | | | SLDTSKSTAYLQMNSLRAEDTAVYYCAKYPHYYGS |
| | | | | SHWYFDVWGQGTLVTVSSASTKGPSVFPLAPEVQL |
| | | | | QQSGPELVKPGASVKMSCKASGYTFTSYVINWVKQ |
| | | | | KPGQGLEWIGLINPYNDGTKYNEKFKVKATLTSDK |
| | | | | SSSTAYMELSSLTSEDSAVYYCASYYYGSRYYFDY |
| | | | | WGQGTTLTVSS |
| 523 | DVD500L | AB014 | AB072 | DIQMTQSPSSLSASVGDRVTITCSASQDISNYLNW |
| | | | | YQQKPGKAPKVLIYFTSSLHSGVPSRFSGSGSGTD |
| | | | | FTLTISSLQPEDFATYYCQQYSTVPWTFGQGTKVE |
| | | | | IKRTVAAPDIQMTQSSSYLSVSLGGRVTITCKASD |
| | | | | HINNWLAWYQQKPGNAPRLLISGATSLETGVPSRF |
| | | | | SGSGSGKDYTLSITSLQTEDVATYYCQQYWSIPLT |
| | | | | FGAGTKLELKR |

### Example 2.104

### Generation of VEGF (Seq. 1) and DLL4 (Seq. 3) DVD-Igs with Linker Set 4

TABLE 157

| | DVD | Outer | Inner | |
|---|---|---|---|---|
| SEQ | Variable | Variable | Variable | |
| ID | Domain | Domain | Domain | Sequence |
| NO | Name | Name | Name | 12345678901234567890123456789012345 |
| 524 | DVD505H | AB072 | AB014 | EVQLQQSGPELVKPGASVKMSCKASGYTFTSYVIN |
| | | | | WVKQKPGQGLEWIGLINPYNDGTKYNEKFKVKATL |
| | | | | TSDKSSSTAYMELSSLTSEDSAVYYCASYYYGSRY |
| | | | | YFDYWGQGTTLTVSSASTKGPEVQLVESGGGLVQP |
| | | | | GGSLRLSCAASGYTFTNYGMNWVRQAPGKGLEWVG |
| | | | | WINTYTGEPTYAADFKRRFTFSLDTSKSTAYLQMN |
| | | | | SLRAEDTAVYYCAKYPHYYGSSHWYFDVWGQGTLV |
| | | | | TVSS |
| 525 | DVD505L | AB072 | AB014 | DIQMTQSSSYLSVSLGGRVTITCKASDHINNWLAW |
| | | | | YQQKPGNAPRLLISGATSLETGVPSRFSGSGSGKD |
| | | | | YTLSITSLQTEDVATYYCQQYWSIPLTFGAGTKLE |
| | | | | LKRTVAAPSVFTFPPDIQMTQSPSSLSASVGDRVT |
| | | | | ITCSASQDISNYLNWYQQKPGKAPKVLIYFTSSLH |
| | | | | SGVPSRFSGSGSGTDFTLTISSLQPEDFATYYCQQ |
| | | | | YSTVPWTFGQGTKVEIKR |
| 526 | DVD506H | AB014 | AB072 | EVQLVESGGGLVQPGGSLRLSCAASGYTFTNYGMN |
| | | | | WVRQAPGKGLEWVGWINTYTGEPTYAADFKRRFTF |
| | | | | SLDTSKSTAYLQMNSLRAEDTAVYYCAKYPHYYGS |
| | | | | SHWYFDVWGQGTLVTVSSASTKGPEVQLQQSGPEL |
| | | | | VKPGASVKMSCKASGYTFTSYVINWVKQKPGQGLE |
| | | | | WIGLINPYNDGTKYNEKFKVKATLTSDKSSSTAYM |
| | | | | ELSSLTSEDSAVYYCASYYYGSRYYFDYWGQGTTL |
| | | | | TVSS |
| 527 | DVD506L | AB014 | AB072 | DIQMTQSPSSLSASVGDRVTITCSASQDISNYLNW |
| | | | | YQQKPGKAPKVLIYFTSSLHSGVPSRFSGSGSGTD |
| | | | | FTLTISSLQPEDFATYYCQQYSTVPWTFGQGTKVE |
| | | | | IKRTVAAPSVFIFPPDIQMTQSSSYLSVSLGGRVT |
| | | | | ITCKASDHINNWLAWYQQKPGNAPRLLISGATSLE |
| | | | | TGVPSRFSGSGSGKDYTLSITSLQTEDVATYYCQQ |
| | | | | YWSIPLTFGAGTKLELKR |

### Example 2.105

### Generation of VEGF (Seq. 2) and DLL4 (Seq. 3) DVD-Igs with Linker Set 1

TABLE 158

| | DVD | Outer | Inner | |
|---|---|---|---|---|
| SEQ | Variable | Variable | Variable | |
| ID | Domain | Domain | Domain | Sequence |
| NO | Name | Name | Name | 12345678901234567890123456789012345 |
| 528 | DVD489H | AB072 | AB070 | EVQLQQSGPELVKPGASVKMSCKASGYTFTSYVIN |
| | | | | WVKQKPGQGLEWIGLINPYNDGTKYNEKFKVKATL |
| | | | | TSDKSSSTAYMELSSLTSEDSAVYYCASYYYGSRY |
| | | | | YFDYWGQGTTLTVSSASTKGPEVQLVESGGGLVQP |
| | | | | GGSLRLSCAASGFTISDYWIHWVRQAPGKGLEWVA |
| | | | | GITPAGGYTYYADSVKGRFTISADTSKNTAYLQMN |
| | | | | SLRAEDTAVYYCARFVFFLPYAMDYWGQGTLVTVS |
| | | | | S |
| 529 | DVD489L | AB072 | AB070 | DIQMTQSSSYLSVSLGGRVTITCKASDHINNWLAW |
| | | | | YQQKPGNAPRLLISGATSLETGVPSRFSGSGSGKD |
| | | | | YTLSITSLQTEDVATYYCQQYWSIPLTFGAGTKLE |
| | | | | LKRTVAAPDIQMTQSPSSLSASVGDRVTITCRASQ |
| | | | | DVSTAVAWYQQKPGKAPKLLIYSASFLYSGVPSRF |
| | | | | SGSGSGTDFTLTISSLQPEDFATYYCQQSYTTPPT |
| | | | | FGQGTKVEIKR |
| 530 | DVD490H | AB070 | AB072 | EVQLVESGGGLVQPGGSLRLSCAASGFTISDYWIH |
| | | | | WVRQAPGKGLEWVAGITPAGGYTYYADSVKGRFTI |
| | | | | SADTSKNTAYLQMNSLRAEDTAVYYCARFVFFLPY |
| | | | | AMDYWGQGTLVTVSSASTKGPEVQLQQSGPELVKP |
| | | | | GASVKMSCKASGYTFTSYVINWVKQKPGQGLEWIG |
| | | | | LINPYNDGTKYNEKFKVKATLTSDKSSSTAYMELS |
| | | | | SLTSEDSAVYYCASYYYGSRYYFDYWGQGTTLTVS |
| | | | | S |
| 531 | DVD490L | AB070 | AB072 | DIQMTQSPSSLSASVGDRVTITCRASQDVSTAVAW |
| | | | | YQQKPGKAPKLLIYSASFLYSGVPSRFSGSGSGTD |
| | | | | FTLTISSLQPEDFATYYCQQSYTTPPTFGQGTKVE |
| | | | | IKRTVAAPDIQMTQSSSYLSVSLGGRVTITCKASD |
| | | | | HINNWLAWYQQKPGNAPRLLISGATSLETGVPSRF |
| | | | | SGSGSGKDYTLSITSLQTEDVATYYCQQYWSIPLT |
| | | | | FGAGTKLELKR |

### Example 2.106

### Generation of VEGF (Seq. 2) and DLL4 (Seq. 3) DVD-Igs with Linker Set 2

TABLE 159

| | DVD | Outer | Inner | |
|---|---|---|---|---|
| SEQ | Variable | Variable | Variable | |
| ID | Domain | Domain | Domain | Sequence |
| NO | Name | Name | Name | 12345678901234567890123456789012345 |
| 532 | DVD495H | AB072 | AB070 | EVQLQQSGPELVKPGASVKMSCKASGYTFTSYVIN |
| | | | | WVKQKPGQGLEWIGLINPYNDGTKYNEKFKVKATL |
| | | | | TSDKSSSTAYMELSSLTSEDSAVYYCASYYYGSRY |
| | | | | YFDYWGQGTTLTVSSASTKGPSVFPLAPEVQLVES |
| | | | | GGGLVQPGGSLRLSCAASGFTISDYWIHWVRQAPG |
| | | | | KGLEWVAGITPAGGYTYYADSVKGRFTISADTSKN |
| | | | | TAYLQMNSLRAEDTAVYYCARFVFFLPYAMDYWGQ |
| | | | | GTLVTVSS |
| 533 | DVD495L | AB072 | AB070 | DIQMTQSSSYLSVSLGGRVTITCKASDHINNWLAW |
| | | | | YQQKPGNAPRLLISGATSLETGVPSRFSGSGSGKD |
| | | | | YTLSITSLQTEDVATYYCQQYWSIPLTFGAGTKLE |
| | | | | LKRTVAAPSVFIFPPDIQMTQSPSSLSASVGDRVT |
| | | | | ITCRASQDVSTAVAWYQQKPGKAPKLLIYSASFLY |
| | | | | SGVPSRFSGSGSGTDFTLTISSLQPEDFATYYCQQ |
| | | | | SYTTPPTFGQGTKVEIKR |
| 534 | DVD496H | AB070 | AB072 | EVQLVESGGGLVQPGGSLRLSCAASGFTISDYWIH |
| | | | | WVRQAPGKGLEWVAGITPAGGYTYYADSVKGRFTI |
| | | | | SADTSKNTAYLQMNSLRAEDTAVYYCARFVFFLPY |
| | | | | AMDYWGQGTLVTVSSASTKGPSVFPLAPEVQLQQS |
| | | | | GPELVKPGASVKMSCKASGYTFTSYVINWVKQKPG |
| | | | | QGLEWIGLINPYNDGTKYNEKFKVKATLTSDKSSS |
| | | | | TAYMELSSLTSEDSAVYYCASYYYGSRYYFDYWGQ |
| | | | | GTTLTVSS |
| 535 | DVD496L | AB070 | AB072 | DIQMTQSPSSLSASVGDRVTITCRASQDVSTAVAW |
| | | | | YQQKPGKAPKLLIYSASFLYSGVPSRFSGSGSGTD |
| | | | | FTLTISSLQPEDFATYYCQQSYTTPPTFGQGTKVE |
| | | | | IKRTVAAPSVFIFPPDIQMTQSSSYLSVSLGGRVT |
| | | | | ITCKASDHINNWLAWYQQKPGNAPRLLISGATSLE |
| | | | | TGVPSRFSGSGSGKDYTLSITSLQTEDVATYYCQQ |
| | | | | YWSIPLTFGAGTKLELKR |

### Example 2.107

### Generation of VEGF (Seq. 2) and DLL4 (Seq. 3) DVD-Igs with Linker Set 3

TABLE 160

| | DVD | Outer | Inner | |
|---|---|---|---|---|
| SEQ | Variable | Variable | Variable | |
| ID | Domain | Domain | Domain | Sequence |
| NO | Name | Name | Name | 12345678901234567890123456789012345 |
| 536 | DVD501H | AB072 | AB070 | EVQLQQSGPELVKPGASVKMSCKASGYTFTSYVIN |
| | | | | WVKQKPGQGLEWIGLINPYNDGTKYNEKFKVKATL |
| | | | | TSDKSSSTAYMELSSLTSEDSAVYYCASYYYGSRY |
| | | | | YFDYWGQGTTLTVSSASTKGPSVFPLAPEVQLVES |
| | | | | GGGLVQPGGSLRLSCAASGFTISDYWIHWVRQAPG |
| | | | | KGLEWVAGITPAGGYTYYADSVKGRFTISADTSKN |
| | | | | TAYLQMNSLRAEDTAVYYCARFVFFLPYAMDYWGQ |
| | | | | GTLVTVSS |
| 537 | DVD501L | AB072 | AB070 | DIQMTQSSSYLSVSLGGRVTITCKASDHINNWLAW |
| | | | | YQQKPGNAPRLLISGATSLETGVPSRFSGSGSGKD |
| | | | | YTLSITSLQTEDVATYYCQQYWSIPLTFGAGTKLE |
| | | | | LKRTVAAPDIQMTQSPSSLSASVGDRVTITCRASQ |
| | | | | DVSTAVAWYQQKPGKAPKLLIYSASFLYSGVPSRF |
| | | | | SGSGSGTDFTLTISSLQPEDFATYYCQQSYTTPPT |
| | | | | FGQGTKVEIKR |
| 538 | DVD502H | AB070 | AB072 | EVQLVESGGGLVQPGGSLRLSCAASGFTISDYWIH |
| | | | | WVRQAPGKGLEWVAGITPAGGYTYYADSVKGRFTI |
| | | | | SADTSKNTAYLQMNSLRAEDTAVYYCARFVFFLPY |
| | | | | AMDYWGQGTLVTVSSASTKGPSVFPLAPEVQLQQS |
| | | | | GPELVKPGASVKMSCKASGYTFTSYVINWVKQKPG |
| | | | | QGLEWIGLINPYNDGTKYNEKFKVKATLTSDKSSS |
| | | | | TAYMELSSLTSEDSAVYYCASYYYGSRYYFDYWGQ |
| | | | | GTTLTVSS |
| 539 | DVD502L | AB070 | AB072 | DIQMTQSPSSLSASVGDRVTITCRASQDVSTAVAW |
| | | | | YQQKPGKAPKLLIYSASFLYSGVPSRFSGSGSGTD |
| | | | | FTLTISSLQPEDFATYYCQQSYTTPPTFGQGTKVE |
| | | | | IKRTVAAPDIQMTQSSSYLSVSLGGRVTITCKASD |
| | | | | HINNWLAWYQQKPGNAPRLLISGATSLETGVPSRF |
| | | | | SGSGSGKDYTLSITSLQTEDVATYYCQQYWSIPLT |
| | | | | FGAGTKLELKR |

### Example 2.108

### Generation of VEGF (Seq. 2) and DLL4 (Seq. 3) DVD-Igs with Linker Set 4

TABLE 161

| | DVD | Outer | Inner | |
|---|---|---|---|---|
| SEQ | Variable | Variable | Variable | |
| ID | Domain | Domain | Domain | Sequence |
| NO | Name | Name | Name | 12345678901234567890123456789012345 |
| 540 | DVD507H | AB072 | AB070 | EVQLQQSGPELVKPGASVKMSCKASGYTFTSYVIN |
| | | | | WVKQKPGQGLEWIGLINPYNDGTKYNEKFKVKATL |
| | | | | TSDKSSSTAYMELSSLTSEDSAVYYCASYYYGSRY |
| | | | | YFDYWGQGTTLTVSSASTKGPEVQLVESGGGLVQP |
| | | | | GGSLRLSCAASGFTISDYWIHWVRQAPGKGLEWVA |
| | | | | GITPAGGYTYYADSVKGRFTISADTSKNTAYLQMN |
| | | | | SLRAEDTAVYYCARFVFFLPYAMDYWGQGTLVTVS |
| | | | | S |
| 541 | DVD507L | AB072 | AB070 | DIQMTQSSSYLSVSLGGRVTITCKASDHINNWLAW |
| | | | | YQQKPGNAPRLLISGATSLETGVPSRFSGSGSGKD |
| | | | | YTLSITSLQTEDVATYYCQQYWSIPLTFGAGTKLE |
| | | | | LKRTVAAPSVFIFPPDIQMTQSPSSLSASVGDRVT |
| | | | | ITCRASQDVSTAVAWYQQKPGKAPKLLIYSASFLY |
| | | | | SGVPSRFSGSGSGTDFTLTISSLQPEDFATYYCQQ |
| | | | | SYTTPPTFGQGTKVEIKR |
| 542 | DVD508H | AB070 | AB072 | EVQLVESGGGLVQPGGSLRLSCAASGFTISDYWIH |
| | | | | WVRQAPGKGLEWVAGITPAGGYTYYADSVKGRFTI |
| | | | | SADTSKNTAYLQMNSLRAEDTAVYYCARFVFFLPY |
| | | | | AMDYWGQGTLVTVSSASTKGPEVQLQQSGPELVKP |
| | | | | GASVKMSCKASGYTFTSYVINWVKQKPGQGLEWIG |
| | | | | LINPYNDGTKYNEKFKVKATLTSDKSSSTAYMELS |
| | | | | SLTSEDSAVYYCASYYYGSRYYFDYWGQGTTLTVS |
| | | | | S |
| 543 | DVD508L | AB070 | AB072 | DIQMTQSPSSLSASVGDRVTITCRASQDVSTAVAW |
| | | | | YQQKPGKAPKLLIYSASFLYSGVPSRFSGSGSGTD |
| | | | | FTLTISSLQPEDFATYYCQQSYTTPPTFGQGTKVE |
| | | | | IKRTVAAPSVFIFPPDIQMTQSSSYLSVSLGGRVT |
| | | | | ITCKASDHINNWLAWYQQKPGNAPRLLISGATSLE |
| | | | | TGVPSRFSGSGSGKDYTLSITSLQTEDVATYYCQQ |
| | | | | YWSIPLTFGAGTKLELKR |

### Example 2.109

### Generation of VEGF (Seq. 3) and DLL4 (Seq. 3) DVD-Igs with Linker Set 1

TABLE 162

| | DVD | Outer | Inner | |
|---|---|---|---|---|
| SEQ | Variable | Variable | Variable | |
| ID | Domain | Domain | Domain | Sequence |
| NO | Name | Name | Name | 12345678901234567890123456789012345 |
| 544 | DVD491H | AB072 | AB071 | EVQLQQSGPELVKPGASVKMSCKASGYTFTSYVIN |
| | | | | WVKQKPGQGLEWIGLINPYNDGTKYNEKFKVKATL |
| | | | | TSDKSSSTAYMELSSLTSEDSAVYYCASYYYGSRY |
| | | | | YFDYWGQGTTLTVSSASTKGPEVQLVESGGGLVQP |
| | | | | GGSLRLSCAASGFTINASWIHWVRQAPGKGLEWVG |
| | | | | AIYPYSGYTNYADSVKGRFTISADTSKNTAYLQMN |
| | | | | SLRAEDTAVYYCARWGHSTSPWAMDYWGQGTLVTV |
| | | | | SS |
| 545 | DVD491L | AB072 | AB071 | DIQMTQSSSYLSVSLGGRVTITCKASDHINNWLAW |
| | | | | YQQKPGNAPRLLISGATSLETGVPSRFSGSGSGKD |
| | | | | YTLSITSLQTEDVATYYCQQYWSIPLTFGAGTKLE |
| | | | | LKRTVAAPDIQMTQSPSSLSASVGDRVTITCRASQ |
| | | | | VIRRSLAWYQQKPGKAPKLLIYAASNLASGVPSRF |
| | | | | SGSGSGTDFTLTISSLQPEDFATYYCQQSNTSPLT |
| | | | | FGQGTKVEIKR |
| 546 | DVD492H | AB071 | AB072 | EVQLVESGGGLVQPGGSLRLSCAASGFTINASWIH |
| | | | | WVRQAPGKGLEWVGAIYPYSGYTNYADSVKGRFTI |
| | | | | SADTSKNTAYLQMNSLRAEDTAVYYCARWGHSTSP |
| | | | | WAMDYWGQGTLVTVSSASTKGPEVQLQQSGPELVK |
| | | | | PGASVKMSCKASGYTFTSYVINWVKQKPGQGLEWI |
| | | | | GLINPYNDGTKYNEKFKVKATLTSDKSSSTAYMEL |
| | | | | SSLTSEDSAVYYCASYYYGSRYYFDYWGQGTTLTV |
| | | | | SS |
| 547 | DVD492L | AB071 | AB072 | DIQMTQSPSSLSASVGDRVTITCRASQVIRRSLAW |
| | | | | YQQKPGKAPKLLIYAASNLASGVPSRFSGSGSGTD |
| | | | | FTLTISSLQPEDFATYYCQQSNTSPLTFGQGTKVE |
| | | | | IKRTVAAPDIQMTQSSSYLSVSLGGRVTITCKASD |
| | | | | HINNWLAWYQQKPGNAPRLLISGATSLETGVPSRF |
| | | | | SGSGSGKDYTLSITSLQTEDVATYYCQQYWSIPLT |
| | | | | FGAGTKLELKR |

### Example 2.110

### Generation of VEGF (Seq. 3) and DLL4 (Seq. 3) DVD-Igs with Linker Set 2

TABLE 163

| | DVD | Outer | Inner | |
|---|---|---|---|---|
| SEQ | Variable | Variable | Variable | |
| ID | Domain | Domain | Domain | Sequence |
| NO | Name | Name | Name | 12345678901234567890123456789012345 |
| 548 | DVD497H | AB072 | AB071 | EVQLQQSGPELVKPGASVKMSCKASGYTFTSYVIN |
| | | | | WVKQKPGQGLEWIGLINPYNDGTKYNEKFKVKATL |
| | | | | TSDKSSSTAYMELSSLTSEDSAVYYCASYYYGSRY |
| | | | | YFDYWGQGTTLTVSSASTKGPSVFPLAPEVQLVES |
| | | | | GGGLVQPGGSLRLSCAASGFTINASWIHWVRQAPG |
| | | | | KGLEWVGAIYPYSGYTNYADSVKGRFTISADTSKN |
| | | | | TAYLQMNSLRAEDTAVYYCARWGHSTSPWAMDYWG |
| | | | | QGTLVTVSS |
| 549 | DVD497L | AB072 | AB071 | DIQMTQSSSYLSVSLGGRVTITCKASDHINNWLAW |
| | | | | YQQKPGNAPRLLISGATSLETGVPSRFSGSGSGKD |
| | | | | YTLSITSLQTEDVATYYCQQYWSIPLTFGAGTKLE |
| | | | | LKRTVAAPSVFIFPPDIQMTQSPSSLSASVGDRVT |
| | | | | ITCRASQVIRRSLAWYQQKPGKAPKLLIYAASNLA |
| | | | | SGVPSRFSGSGSGTDFTLTISSLQPEDFATYYCQQ |
| | | | | SNTSPLTFGQGTKVEIKR |
| 550 | DVD498H | AB071 | AB072 | EVQLVESGGGLVQPGGSLRLSCAASGFTINASWIH |
| | | | | WVRQAPGKGLEWVGAIYPYSGYTNYADSVKGRFTI |
| | | | | SADTSKNTAYLQMNSLRAEDTAVYYCARWGHSTSP |
| | | | | WAMDYWGQGTLVTVSSASTKGPSVFPLAPEVQLQQ |
| | | | | SGPELVKPGASVKMSCKASGYTFTSYVINWVKQKP |
| | | | | GQGLEWIGLINPYNDGTKYNEKFKVKATLTSDKSS |
| | | | | STAYMELSSLTSEDSAVYYCASYYYGSRYYFDYWG |
| | | | | QGTTLTVSS |
| 551 | DVD498L | AB071 | AB072 | DIQMTQSPSSLSASVGDRVTITCRASQVIRRSLAW |
| | | | | YQQKPGKAPKLLIYAASNLASGVPSRFSGSGSGTD |
| | | | | FTLTISSLQPEDFATYYCQQSNTSPLTFGQGTKVE |
| | | | | IKRTVAAPSVFIFPPDIQMTQSSSYLSVSLGGRVT |
| | | | | ITCKASDHINNWLAWYQQKPGNAPRLLISGATSLE |
| | | | | TGVPSRFSGSGSGKDYTLSITSLQTEDVATYYCQQ |
| | | | | YWSIPLTFGAGTKLELKR |

### Example 2.111

### Generation of VEGF (Seq. 3) and DLL4 (Seq. 3) DVD-Igs with Linker Set 3

TABLE 164

| | DVD | Outer | Inner | |
|---|---|---|---|---|
| SEQ | Variable | Variable | Variable | |
| ID | Domain | Domain | Domain | Sequence |
| NO | Name | Name | Name | 12345678901234567890123456789012345 |
| 552 | DVD503H | AB072 | AB071 | EVQLQQSGPELVKPGASVKMSCKASGYTFTSYVIN |
| | | | | WVKQKPGQGLEWIGLINPYNDGTKYNEKFKVKATL |
| | | | | TSDKSSSTAYMELSSLTSEDSAVYYCASYYYGSRY |
| | | | | YFDYWGQGTTLTVSSASTKGPSVFPLAPEVQLVES |
| | | | | GGGLVQPGGSLRLSCAASGFTINASWIHWVRQAPG |
| | | | | KGLEWVGAIYPYSGYTNYADSVKGRFTISADTSKN |
| | | | | TAYLQMNSLRAEDTAVYYCARWGHSTSPWAMDYWG |
| | | | | QGTLVTVSS |
| 553 | DVD503L | AB072 | AB071 | DIQMTQSSSYLSVSLGGRVTITCKASDHINNWLAW |
| | | | | YQQKPGNAPRLLISGATSLETGVPSRFSGSGSGKD |
| | | | | YTLSITSLQTEDVATYYCQQYWSIPLTFGAGTKLE |
| | | | | LKRTVAAPDIQMTQSPSSLSASVGDRVTITCRASQ |
| | | | | VIRRSLAWYQQKPGKAPKLLIYAASNLASGVPSRF |
| | | | | SGSGSGTDFTLTISSLQPEDFATYYCQQSNTSPLT |
| | | | | FGQGTKVEIKR |
| 554 | DVD504H | AB071 | AB072 | EVQLVESGGGLVQPGGSLRLSCAASGFTINASWIH |
| | | | | WVRQAPGKGLEWVGAIYPYSGYTNYADSVKGRFTI |
| | | | | SADTSKNTAYLQMNSLRAEDTAVYYCARWGHSTSP |
| | | | | WAMDYWGQGTLVTVSSASTKGPSVFPLAPEVQLQQ |
| | | | | SGPELVKPGASVKMSCKASGYTFTSYVINWVKQKP |
| | | | | GQGLEWIGLINPYNDGTKYNEKFKVKATLTSDKSS |
| | | | | STAYMELSSLTSEDSAVYYCASYYYGSRYYFDYWG |
| | | | | QGTTLTVSS |
| 555 | DVD504L | AB071 | AB072 | DIQMTQSPSSLSASVGDRVTITCRASQVIRRSLAW |
| | | | | YQQKPGKAPKLLIYAASNLASGVPSRFSGSGSGTD |
| | | | | FTLTISSLQPEDFATYYCQQSNTSPLTFGQGTKVE |
| | | | | IKRTVAAPDIQMTQSSSYLSVSLGGRVTITCKASD |
| | | | | HINNWLAWYQQKPGNAPRLLISGATSLETGVPSRF |
| | | | | SGSGSGKDYTLSITSLQTEDVATYYCQQYWSIPLT |
| | | | | FGAGTKLELKR |

### Example 2.112

### Generation of VEGF (Seq. 3) and DLL4 (Seq. 3) DVD-Igs with Linker Set 4

TABLE 165

| | DVD | Outer | Inner | |
|---|---|---|---|---|
| SEQ | Variable | Variable | Variable | |
| ID | Domain | Domain | Domain | Sequence |
| NO | Name | Name | Name | 12345678901234567890123456789012345 |
| 556 | DVD509H | AB072 | AB071 | EVQLQQSGPELVKPGASVKMSCKASGYTFTSYVIN |
| | | | | WVKQKPGQGLEWIGLINPYNDGTKYNEKFKVKATL |
| | | | | TSDKSSSTAYMELSSLTSEDSAVYYCASYYYGSRY |
| | | | | YFDYWGQGTTLTVSSASTKGPEVQLVESGGGLVQP |
| | | | | GGSLRLSCAASGFTINASWIHWVRQAPGKGLEWVG |
| | | | | AIYPYSGYTNYADSVKGRFTISADTSKNTAYLQMN |
| | | | | SLRAEDTAVYYCARWGHSTSPWAMDYWGQGTLVTV |
| | | | | SS |
| 557 | DVD509L | AB072 | AB071 | DIQMTQSSSYLSVSLGGRVTITCKASDHINNWLAW |
| | | | | YQQKPGNAPRLLISGATSLETGVPSRFSGSGSGKD |
| | | | | YTLSITSLQTEDVATYYCQQYWSIPLTFGAGTKLE |
| | | | | LKRTVAAPSVFIFPPDIQMTQSPSSLSASVGDRVT |
| | | | | ITCRASQVIRRSLAWYQQKPGKAPKLLIYAASNLA |
| | | | | SGVPSRFSGSGSGTDFTLTISSLQPEDFATYYCQQ |
| | | | | SNTSPLTFGQGTKVEIKR |
| 558 | DVD510H | AB071 | AB072 | EVQLVESGGGLVQPGGSLRLSCAASGFTINASWIH |
| | | | | WVRQAPGKGLEWVGAIYPYSGYTNYADSVKGRFTI |
| | | | | SADTSKNTAYLQMNSLRAEDTAVYYCARWGHSTSP |
| | | | | WAMDYWGQGTLVTVSSASTKGPEVQLQQSGPELVK |
| | | | | PGASVKMSCKASGYTFTSYVINWVKQKPGQGLEWI |
| | | | | GLINPYNDGTKYNEKFKVKATLTSDKSSSTAYMEL |
| | | | | SSLTSEDSAVYYCASYYYGSRYYFDYWGQGTTLTV |
| | | | | SS |
| 559 | DVD510L | AB071 | AB072 | DIQMTQSPSSLSASVGDRVTITCRASQVIRRSLAW |
| | | | | YQQKPGKAPKLLIYAASNLASGVPSRFSGSGSGTD |
| | | | | FTLTISSLQPEDFATYYCQQSNTSPLTFGQGTKVE |
| | | | | IKRTVAAPSVFIFPPDIQMTQSSSYLSVSLGGRVT |
| | | | | ITCKASDHINNWLAWYQQKPGNAPRLLISGATSLE |
| | | | | TGVPSRFSGSGSGKDYTLSITSLQTEDVATYYCQQ |
| | | | | YWSIPLTFGAGTKLELKR |

### Example 2.113

### Generation of VEGF (Seq. 1) and DLL4 (Seq. 4) DVD-Igs with Linker Set 1

TABLE 166

| | DVD | Outer | Inner | |
|---|---|---|---|---|
| SEQ | Variable | Variable | Variable | |
| ID | Domain | Domain | Domain | Sequence |
| NO | Name | Name | Name | 12345678901234567890123456789012345 |
| 560 | DVD511H | AB073 | AB014 | EVQLQQSGPELEKPGASVKISCKASGYSFTGYNMN |
| | | | | WVKQSNGKSLEWIGNIDPYFGGTNYNQKFKGKATL |
| | | | | TVDKSSSTAYMQLKSLTSEDSAVYYCARNYDYDGG |
| | | | | CFDYWGQGTTLTVSSASTKGPEVQLVESGGGLVQP |
| | | | | GGSLRLSCAASGYTFTNYGMNWVRQAPGKGLEWVG |
| | | | | WINTYTGEPTYAADFKRRFTFSLDTSKSTAYLQMN |
| | | | | SLRAEDTAVYYCAKYPHYYGSSHWYFDVWGQGTLV |
| | | | | TVSS |
| 561 | DVD511L | AB073 | AB014 | QAVVTQESALTTSPGETVTLTCRSSTGAVTTSNYA |
| | | | | NWVQEKPDHLFTGLIGGTNNRAPGVPARFSGSLIG |
| | | | | DKAALTITGAQTEDEAIYFCALWYSNHWVFGGGTK |
| | | | | LTVLGQPKAAPDIQMTQSPSSLSASVGDRVTITCS |
| | | | | ASQDISNYLNWYQQKPGKAPKVLIYFTSSLHSGVP |
| | | | | SRFSGSGSGTDFTLTISSLQPEDFATYYCQQYSTV |
| | | | | PWTFGQGTKVEIKR |
| 562 | DVD512H | AB014 | AB073 | EVQLVESGGGLVQPGGSLRLSCAASGYTFTNYGMN |
| | | | | WVRQAPGKGLEWVGWINTYTGEPTYAADFKRRFTF |
| | | | | SLDTSKSTAYLQMNSLRAEDTAVYYCAKYPHYYGS |
| | | | | SHWYFDVWGQGTLVTVSSASTKGPEVQLQQSGPEL |
| | | | | EKPGASVKISCKASGYSFTGYNMNWVKQSNGKSLE |
| | | | | WIGNIDPYFGGTNYNQKFKGKATLTVDKSSSTAYM |
| | | | | QLKSLTSEDSAVYYCARNYDYDGGCFDYWGQGTTL |
| | | | | TVSS |
| 563 | DVD512L | AB014 | AB073 | DIQMTQSPSSLSASVGDRVTITCSASQDISNYLNW |
| | | | | YQQKPGKAPKVLIYFTSSLHSGVPSRFSGSGSGTD |
| | | | | FTLTISSLQPEDFATYYCQQYSTVPWTFGQGTKVE |
| | | | | IKRTVAAPQAVVTQESALTTSPGETVTLTCRSSTG |
| | | | | AVTTSNYANWVQEKPDHLFTGLTGGTNNRAPGVPA |
| | | | | RFSGSLIGDKAALTITGAQTEDEAIYFCALWYSNH |
| | | | | WVFGGGTKLTVLG |

### Example 2.114

### Generation of VEGF (Seq. 1) and DLL4 (Seq. 4) DVD-Igs with Linker Set 2

TABLE 167

| | DVD | Outer | Inner | |
|---|---|---|---|---|
| SEQ | Variable | Variable | Variable | |
| ID | Domain | Domain | Domain | Sequence |
| NO | Name | Name | Name | 12345678901234567890123456789012345 |
| 564 | DVD517H | AB073 | AB014 | EVQLQQSGPELEKPGASVKISCKASGYSFTGYNMN |
| | | | | WVKQSNGKSLEWIGNIDPYFGGTNYNQKFKGKATL |
| | | | | TVDKSSSTAYMQLKSLTSEDSAVYYCARNYDYDGG |
| | | | | CFDYWGQGTTLTVSSASTKGPSVFPLAPEVQLVES |
| | | | | GGGLVQPGGSLRLSCAASGYTFTNYGMNWVRQAPG |
| | | | | KGLEWVGWINTYTGEPTYAADFKRRFTFSLDTSKS |
| | | | | TAYLQMNSLRAEDTAVYYCAKYPHYYGSSHWYFDV |
| | | | | WGQGTLVTVSS |
| 565 | DVD517L | AB073 | AB014 | QAVVTQESALTTSPGETVTLTCRSSTGAVTTSNYA |
| | | | | NWVQEKPDHLFTGLIGGTNNRAPGVPARFSGSLIG |
| | | | | DKAALTITGAQTEDEAIYFCALWYSNHWVFGGGTK |
| | | | | LTVLGQPKAAPSVTLFPPDIQMTQSPSSLSASVGD |
| | | | | RVTITCSASQDISNYLNWYQQKPGKAPKVLIYFTS |
| | | | | SLHSGVPSRFSGSGSGTDFTLTISSLQPEDFATYY |
| | | | | CQQYSTVPWTFGQGTKVEIKR |
| 566 | DVD518H | AB014 | AB073 | EVQLVESGGGLVQPGGSLRLSCAASGYTFTNYGMN |
| | | | | WVRQAPGKGLEWVGWINTYTGEPTYAADFKRRFTF |
| | | | | SLDTSKSTAYLQMNSLRAEDTAVYYCAKYPHYYGS |
| | | | | SHWYFDVWGQGTLVTVSSASTKGPSVFPLAPEVQL |
| | | | | QQSGPELEKPGASVKISCKASGYSFTGYNMNWVKQ |
| | | | | SNGKSLEWIGNIDPYFGGTNYNQKFKGKATLTVDK |
| | | | | SSSTAYMQLKSLTSEDSAVYYCARNYDYDGGCFDY |
| | | | | WGQGTTLTVSS |
| 567 | DVD518L | AB014 | AB073 | DIQMTQSPSSLSASVGDRVTITCSASQDISNYLNW |
| | | | | YQQKPGKAPKVLIYFTSSLHSGVPSRFSGSGSGTD |
| | | | | FTLTISSLQPEDFATYYCQQYSTVPWTFGQGTKVE |
| | | | | IKRTVAAPSVFIFPPQAVVTQESALTTSPGETVTL |
| | | | | TCRSSTGAVTTSNYANWVQEKPDHLFTGLIGGTNN |
| | | | | RAPGVPARFSGSLIGDKAALTITGAQTEDEAIYFC |
| | | | | ALWYSNHWVFGGGTKLTVLG |

### Example 2.115

### Generation of VEGF (Seq. 1) and DLL4 (Seq. 4) DVD-Igs with Linker Set 3

TABLE 168

| | DVD | Outer | Inner | |
|---|---|---|---|---|
| SEQ | Variable | Variable | Variable | |
| ID | Domain | Domain | Domain | Sequence |
| NO | Name | Name | Name | 12345678901234567890123456789012345 |
| 568 | DVD523H | AB073 | AB014 | EVQLQQSGPELEKPGASVKISCKASGYSFTGYNMN |
| | | | | WVKQSNGKSLEWIGNIDPYFGGTNYNQKFKGKATL |
| | | | | TVDKSSSTAYMQLKSLTSEDSAVYYCARNYDYDGG |
| | | | | CFDYWGQGTTLTVSSASTKGPSVFPLAPEVQLVES |
| | | | | GGGLVQPGGSLRLSCAASGYTFTNYGMNWVRQAPG |
| | | | | KGLEWVGWINTYTGEPTYAADFKRRFTFSLDTSKS |
| | | | | TAYLQMNSLRAEDTAVYYCAKYPHYYGSSHWYFDV |
| | | | | WGQGTLVTVSS |
| 569 | DVD523L | AB073 | AB014 | QAVVTQESALTTSPGETVTLTCRSSTGAVTTSNYA |
| | | | | NWVQEKPDHLFTGLIGGTNNRAPGVPARFSGSLIG |
| | | | | DKAALTITGAQTEDEAIYFCALWYSNHWVFGGGTK |
| | | | | LTVLGQPKAAPDIQMTQSPSSLSASVGDRVTITCS |
| | | | | ASQDISNYLNWYQQKPGKAPKVLIYFTSSLHSGVP |
| | | | | SRFSGSGSGTDFTLTISSLQPEDFATYYCQQYSTV |
| | | | | PWTFGQGTKVEIKR |
| 570 | DVD524H | AB014 | AB073 | EVQLVESGGGLVQPGGSLRLSCAASGYTFTNYGMN |
| | | | | WVRQAPGKGLEWVGWINTYTGEPTYAADFKRRFTF |
| | | | | SLDTSKSTAYLQMNSLRAEDTAVYYCAKYPHYYGS |
| | | | | SHWYFDVWGQGTLVTVSSASTKGPSVFPLAPEVQL |
| | | | | QQSGPELEKPGASVKISCKASGYSFTGYNMNWVKQ |
| | | | | SNGKSLEWIGNIDPYFGGTNYNQKFKGKATLTVDK |
| | | | | SSSTAYMQLKSLTSEDSAVYYCARNYDYDGGCFDY |
| | | | | WGQGTTLTVSS |
| 571 | DVD524L | AB014 | AB073 | DIQMTQSPSSLSASVGDRVTITCSASQDISNYLNW |
| | | | | YQQKPGKAPKVLIYFTSSLHSGVPSRFSGSGSGTD |
| | | | | FTLTISSLQPEDFATYYCQQYSTVPWTFGQGTKVE |
| | | | | IKRTVAAPQAVVTQESALTTSPGETVTLTCRSSTG |
| | | | | AVTTSNYANWVQEKPDHLFTGLIGGTNNRAPGVPA |
| | | | | RFSGSLIGDKAALTITGAQTEDEAIYFCALWYSNH |
| | | | | WVFGGGTKLTVLG |

### Example 2.116

### Generation of VEGF (Seq. 1) and DLL4 (Seq. 4) DVD-Igs with Linker Set 4

TABLE 169

| | DVD | Outer | Inner | |
|---|---|---|---|---|
| SEQ | Variable | Variable | Variable | |
| ID | Domain | Domain | Domain | Sequence |
| NO | Name | Name | Name | 12345678901234567890123456789012345 |
| 572 | DVD529H | AB073 | AB014 | EVQLQQSGPELEKPGASVKISCKASGYSFTGYNMN |
| | | | | WVKQSNGKSLEWIGNIDPYFGGTNYNQKFKGKATL |
| | | | | TVDKSSSTAYMQLKSLTSEDSAVYYCARNYDYDGG |
| | | | | CFDYWGQGTTLTVSSASTKGPEVQLVESGGGLVQP |
| | | | | GGSLRLSCAASGYTFTNYGMNWVRQAPGKGLEWVG |
| | | | | WINTYTGEPTYAADFKRRFTFSLDTSKSTAYLQMN |
| | | | | SLRAEDTAVYYCAKYPHYYGSSHWYFDVWGQGTLV |
| | | | | TVSS |
| 573 | DVD529L | AB073 | AB014 | QAVVTQESALTTSPGETVTLTCRSSTGAVTTSNYA |
| | | | | NWVQEKPDHLFTGLIGGTNNRAPGVPARFSGSLIG |
| | | | | DKAALTITGAQTEDEAIYFCALWYSNHWVFGGGTK |
| | | | | LTVLGQPKAAPSVTLFPPDIQMTQSPSSLSASVGD |
| | | | | RVTITCSASQDISNYLNWYQQKPGKAPKVLIYFTS |
| | | | | SLHSGVPSRFSGSGSGTDFTLTISSLQPEDFATYY |
| | | | | CQQYSTVPWTFGQGTKVEIKR |
| 574 | DVD530H | AB014 | AB073 | EVQLVESGGGLVQPGGSLRLSCAASGYTFTNYGMN |
| | | | | WVRQAPGKGLEWVGWINTYTGEPTYAADFKRRFTF |
| | | | | SLDTSKSTAYLQMNSLRAEDTAVYYCAKYPHYYGS |
| | | | | SHWYFDVWGQGTLVTVSSASTKGPEVQLQQSGPEL |
| | | | | EKPGASVKISCKASGYSFTGYNMNWVKQSNGKSLE |
| | | | | WIGNIDPYFGGTNYNQKFKGKATLTVDKSSSTAYM |
| | | | | QLKSLTSEDSAVYYCARNYDYDGGCFDYWGQGTTL |
| | | | | TVSS |
| 575 | DVD530L | AB014 | AB073 | DIQMTQSPSSLSASVGDRVTITCSASQDISNYLNW |
| | | | | YQQKPGKAPKVLIYFTSSLHSGVPSRFSGSGSGTD |
| | | | | FTLTISSLQPEDFATYYCQQYSTVPWTFGQGTKVE |
| | | | | IKRTVAAPSVFIFPPQAVVTQESALTTSPGETVTL |
| | | | | TCRSSTGAVTTSNYANWVQEKPDHLFTGLIGGTNN |
| | | | | RAPGVPARFSGSLIGDKAALTITGAQTEDEAIYFC |
| | | | | ALWYSNHWVFGGGTKLTVLG |

### Example 2.117

### Generation of VEGF (Seq. 2) and DLL4 (Seq. 4) DVD-Igs with Linker Set 1

TABLE 170

| | DVD | Outer | Inner | |
|---|---|---|---|---|
| SEQ | Variable | Variable | Variable | |
| ID | Domain | Domain | Domain | Sequence |
| NO | Name | Name | Name | 12345678901234567890123456789012345 |
| 576 | DVD513H | AB073 | AB070 | EVQLQQSGPELEKPGASVKISCKASGYSFTGYNMN |
| | | | | WVKQSNGKSLEWIGNIDPYFGGTNYNQKFKGKATL |
| | | | | TVDKSSSTAYMQLKSLTSEDSAVYYCARNYDYDGG |
| | | | | CFDYWGQGTTLTVSSASTKGPEVQLVESGGGLVQP |
| | | | | GGSLRLSCAASGFTISDYWIHWVRQAPGKGLEWVA |
| | | | | GITPAGGYTYYADSVKGRFTISADTSKNTAYLQMN |
| | | | | SLRAEDTAVYYCARFVFFLPYAMDYWGQGTLVTVS |
| | | | | S |
| 577 | DVD513L | AB073 | AB070 | QAVVTQESALTTSPGETVTLTCRSSTGAVTTSNYA |
| | | | | NWVQEKPDHLFTGLIGGTNNRAPGVPARFSGSLIG |
| | | | | DKAALTITGAQTEDEAIYFCALWYSNHWVFGGGTK |
| | | | | LTVLGQPKAAPDIQMTQSPSSLSASVGDRVTITCR |
| | | | | ASQDVSTAVAWYQQKPGKAPKLLIYSASFLYSGVP |
| | | | | SRFSGSGSGTDFTLTISSLQPEDFATYYCQQSYTT |
| | | | | PPTFGQGTKVEIKR |
| 578 | DVD514H | AB070 | AB073 | EVQLVESGGGLVQPGGSLRLSCAASGFTISDYWIH |
| | | | | WVRQAPGKGLEWVAGITPAGGYTYYADSVKGRFTI |
| | | | | SADTSKNTAYLQMNSLRAEDTAVYYCARFVFFLPY |
| | | | | AMDYWGQGTLVTVSSASTKGPEVQLQQSGPELEKP |
| | | | | GASVKISCKASGYSFTGYNMNWVKQSNGKSLEWIG |
| | | | | NIDPYFGGTNYNQKFKGKATLTVDKSSSTAYMQLK |
| | | | | SLTSEDSAVYYCARNYDYDGGCFDYWGQGTTLTVS |
| | | | | S |
| 579 | DVD514L | AB070 | AB073 | DIQMTQSPSSLSASVGDRVTITCRASQDVSTAVAW |
| | | | | YQQKPGKAPKLLIYSASFLYSGVPSRFSGSGSGTD |
| | | | | FTLTISSLQPEDFATYYCQQSYTTPPTFGQGTKVE |
| | | | | IKRTVAAPQAVVTQESALTTSPGETVTLTCRSSTG |
| | | | | AVTTSNYANWVQEKPDHLFTGLIGGTNNRAPGVPA |
| | | | | RFSGSLIGDKAALTITGAQTEDEAIYFCALWYSNH |
| | | | | WVFGGGTKLTVLG |

### Example 2.118

### Generation of VEGF (Seq. 2) and DLL4 (Seq. 4) DVD-Igs with Linker Set 2

TABLE 171

| | DVD | Outer | Inner | |
|---|---|---|---|---|
| SEQ | Variable | Variable | Variable | |
| ID | Domain | Domain | Domain | Sequence |
| NO | Name | Name | Name | 12345678901234567890123456789012345 |
| 580 | DVD519H | AB073 | AB070 | EVQLQQSGPELEKPGASVKISCKASGYSFTGYNMN |
| | | | | WVKQSNGKSLEWIGNIDPYFGGTNYNQKFKGKATL |
| | | | | TVDKSSSTAYMQLKSLTSEDSAVYYCARNYDYDGG |
| | | | | CFDYWGQGTTLTVSSASTKGPSVFPLAPEVQLVES |
| | | | | GGGLVQPGGSLRLSCAASGFTISDYWIHWVRQAPG |
| | | | | KGLEWVAGITPAGGYTYYADSVKGRFTISADTSKN |
| | | | | TAYLQMNSLRAEDTAVYYCARFVFFLPYAMDYWGQ |
| | | | | GTLVTVSS |
| 581 | DVD519L | AB073 | AB070 | QAVVTQESALTTSPGETVTLTCRSSTGAVTTSNYA |
| | | | | NWVQEKPDHLFTGLIGGTNNRAPGVPARFSGSLIG |
| | | | | DKAALTITGAQTEDEAIYFCALWYSNHWVFGGGTK |
| | | | | LTVLGQPKAAPSVTLFPPDIQMTQSPSSLSASVGD |
| | | | | RVTITCRASQDVSTAVAWYQQKPGKAPKLLIYSAS |
| | | | | FLYSGVPSRFSGSGSGTDFTLTISSLQPEDFATYY |
| | | | | CQQSYTTPPTFGQGTKVEIKR |
| 582 | DVD520H | AB070 | AB073 | EVQLVESGGGLVQPGGSLRLSCAASGFTISDYWIH |
| | | | | WVRQAPGKGLEWVAGITPAGGYTYYADSVKGRFTI |
| | | | | SADTSKNTAYLQMNSLRAEDTAVYYCARFVFFLPY |
| | | | | AMDYWGQGTLVTVSSASTKGPSVFPLAPEVQLQQS |
| | | | | GPELEKPGASVKISCKASGYSFTGYNMNWVKQSNG |
| | | | | KSLEWIGNIDPYFGGTNYNQKFKGKATLTVDKSSS |
| | | | | TAYMQLKSLTSEDSAVYYCARNYDYDGGCFDYWGQ |
| | | | | GTTLTVSS |
| 583 | DVD520L | AB070 | AB073 | DIQMTQSPSSLSASVGDRVTITCRASQDVSTAVAW |
| | | | | YQQKPGKAPKLLIYSASFLYSGVPSRFSGSGSGTD |
| | | | | FTLTISSLQPEDFATYYCQQSYTTPPTFGQGTKVE |
| | | | | IKRTVAAPSVFIFPPQAVVTQESALTTSPGETVTL |
| | | | | TCRSSTGAVTTSNYANWVQEKPDHLFTGLIGGTNN |
| | | | | RAPGVPARFSGSLIGDKAALTITGAQTEDEAIYFC |
| | | | | ALWYSNHWVFGGGTKLTVLG |

### Example 2.119

### Generation of VEGF (Seq. 2) and DLL4 (Seq. 4) DVD-Igs with Linker Set 3

TABLE 172

| | DVD | Outer | Inner | |
|---|---|---|---|---|
| SEQ | Variable | Variable | Variable | |
| ID | Domain | Domain | Domain | Sequence |
| NO | Name | Name | Name | 12345678901234567890123456789012345 |
| 584 | DVD525H | AB073 | AB070 | EVQLQQSGPELEKPGASVKISCKASGYSFTGYNMN |
| | | | | WVKQSNGKSLEWIGNIDPYFGGTNYNQKFKGKATL |
| | | | | TVDKSSSTAYMQLKSLTSEDSAVYYCARNYDYDGG |
| | | | | CFDYWGQGTTLTVSSASTKGPSVFPLAPEVQLVES |
| | | | | GGGLVQPGGSLRLSCAASGFTISDYWIHWVRQAPG |
| | | | | KGLEWVAGITPAGGYTYYADSVKGRFTISADTSKN |
| | | | | TAYLQMNSLRAEDTAVYYCARFVFFLPYAMDYWGQ |
| | | | | GTLVTVSS |
| 585 | DVD525L | AB073 | AB070 | QAVVTQESALTTSPGETVTLTCRSSTGAVTTSNYA |
| | | | | NWVQEKPDHLFTGLIGGTNNRAPGVPARFSGSLIG |
| | | | | DKAALTITGAQTEDEAIYFCALWYSNHWVFGGGTK |
| | | | | LTVLGQPKAAPDIQMTQSPSSLSASVGDRVTITCR |
| | | | | ASQDVSTAVAWYQQKPGKAPKLLIYSASFLYSGVP |
| | | | | SRFSGSGSGTDFTLTISSLQPEDFATYYCQQSYTT |
| | | | | PPTFGQGTKVEIKR |
| 586 | DVD526H | AB070 | AB073 | EVQLVESGGGLVQPGGSLRLSCAASGFTISDYWIH |
| | | | | WVRQAPGKGLEWVAGITPAGGYTYYADSVKGRFTI |
| | | | | SADTSKNTAYLQMNSLRAEDTAVYYCARFVFFLPY |
| | | | | AMDYWGQGTLVTVSSASTKGPSVFPLAPEVQLQQS |
| | | | | GPELEKPGASVKISCKASGYSFTGYNMNWVKQSNG |
| | | | | KSLEWIGNIDPYFGGTNYNQKFKGKATLTVDKSSS |
| | | | | TAYMQLKSLTSEDSAVYYCARNYDYDGGCFDYWGQ |
| | | | | GTTLTVSS |
| 587 | DVD526L | AB070 | AB073 | DIQMTQSPSSLSASVGDRVTITCRASQDVSTAVAW |
| | | | | YQQKPGKAPKLLIYSASFLYSGVPSRFSGSGSGTD |
| | | | | FTLTISSLQPEDFATYYCQQSYTTPPTFGQGTKVE |
| | | | | IKRTVAAPQAVVTQESALTTSPGETVTLTCRSSTG |
| | | | | AVTTSNYANWVQEKPDHLFTGLIGGTNNRAPGVPA |
| | | | | RFSGSLIGDKAALTITGAQTEDEAIYFCALWYSNH |
| | | | | WVFGGGTKLTVLG |

### Example 2.120

### Generation of VEGF (Seq. 2) and DLL4 (Seq. 4) DVD-Igs with Linker Set 4

TABLE 173

| | DVD | Outer | Inner | |
|---|---|---|---|---|
| SEQ | Variable | Variable | Variable | |
| ID | Domain | Domain | Domain | Sequence |
| NO | Name | Name | Name | 12345678901234567890123456789012345 |
| 588 | DVD531H | AB073 | AB070 | EVQLQQSGPELEKPGASVKISCKASGYSFTGYNMN |
| | | | | WVKQSNGKSLEWIGNIDPYFGGTNYNQKFKGKATL |
| | | | | TVDKSSSTAYMQLKSLTSEDSAVYYCARNYDYDGG |
| | | | | CFDYWGQGTTLTVSSASTKGPEVQLVESGGGLVQP |
| | | | | GGSLRLSCAASGFTISDYWIHWVRQAPGKGLEWVA |
| | | | | GITPAGGYTYYADSVKGRFTISADTSKNTAYLQMN |
| | | | | SLRAEDTAVYYCARFVFFLPYAMDYWGQGTLVTVS |
| | | | | S |
| 589 | DVD531L | AB073 | AB070 | QAVVTQESALTTSPGETVTLTCRSSTGAVTTSNYA |
| | | | | NWVQEKPDHLFTGLIGGTNNRAPGVPARFSGSLIG |
| | | | | DKAALTITGAQTEDEAIYFCALWYSNHWVFGGGTK |
| | | | | LTVLGQPKAAPSVTLFPPDIQMTQSPSSLSASVGD |
| | | | | RVTITCRASQDVSTAVAWYQQKPGKAPKLLIYSAS |
| | | | | FLYSGVPSRFSGSGSGTDFTLTISSLQPEDFATYY |
| | | | | CQQSYTTPPTFGQGTKVEIKR |
| 590 | DVD532H | AB070 | AB073 | EVQLVESGGGLVQPGGSLRLSCAASGFTISDYWIH |
| | | | | WVRQAPGKGLEWVAGITPAGGYTYYADSVKGRFTI |
| | | | | SADTSKNTAYLQMNSLRAEDTAVYYCARFVFFLPY |
| | | | | AMDYWGQGTLVTVSSASTKGPEVQLQQSGPELEKP |
| | | | | GASVKISCKASGYSFTGYNMNWVKQSNGKSLEWIG |
| | | | | NIDPYFGGTNYNQKFKGKATLTVDKSSSTAYMQLK |
| | | | | SLTSEDSAVYYCARNYDYDGGCFDYWGQGTTLTVS |
| | | | | S |
| 591 | DVD532L | AB070 | AB073 | DIQMTQSPSSLSASVGDRVTITCRASQDVSTAVAW |
| | | | | YQQKPGKAPKLLIYSASFLYSGVPSRFSGSGSGTD |
| | | | | FTLTISSLQPEDFATYYCQQSYTTPPTFGQGTKVE |
| | | | | IKRTVAAPSVFIFPPQAVVTQESALTTSPGETVTL |
| | | | | TCRSSTGAVTTSNYANWVQEKPDHLFTGLIGGTNN |
| | | | | RAPGVPARFSGSLIGDKAALTITGAQTEDEAIYFC |
| | | | | ALWYSNHWVFGGGTKLTVLG |

### Example 2.121

### Generation of VEGF (Seq. 3) and DLL4 (Seq. 4) DVD-Igs with Linker Set 1

TABLE 174

| | DVD | Outer | Inner | |
|---|---|---|---|---|
| SEQ | Variable | Variable | Variable | |
| ID | Domain | Domain | Domain | Sequence |
| NO | Name | Name | Name | 12345678901234567890123456789012345 |
| 592 | DVD515H | AB073 | AB071 | EVQLQQSGPELEKPGASVKISCKASGYSFTGYNMN |
| | | | | WVKQSNGKSLEWIGNIDPYFGGTNYNQKFKGKATL |
| | | | | TVDKSSSTAYMQLKSLTSEDSAVYYCARNYDYDGG |
| | | | | CFDYWGQGTTLTVSSASTKGPEVQLVESGGGLVQP |
| | | | | GGSLRLSCAASGFTINASWIHWVRQAPGKGLEWVG |
| | | | | AIYPYSGYTNYADSVKGRFTISADTSKNTAYLQMN |
| | | | | SLRAEDTAVYYCARWGHSTSPWAMDYWGQGTLVTV |
| | | | | SS |
| 593 | DVD515L | AB073 | AB071 | QAVVTQESALTTSPGETVTLTCRSSTGAVTTSNYA |
| | | | | NWVQEKPDHLFTGLIGGTNNRAPGVPARFSGSLIG |
| | | | | DKAALTITGAQTEDEAIYFCALWYSNHWVFGGGTK |
| | | | | LTVLGQPKAAPDIQMTQSPSSLSASVGDRVTITCR |
| | | | | ASQVIRRSLAWYQQKPGKAPKLLIYAASNLASGVP |
| | | | | SRFSGSGSGTDFTLTISSLQPEDFATYYCQQSNTS |
| | | | | PLTFGQGTKVEIKR |
| 594 | DVD516H | AB071 | AB073 | EVQLVESGGGLVQPGGSLRLSCAASGFTINASWIH |
| | | | | WVRQAPGKGLEWVGAIYPYSGYTNYADSVKGRFTI |
| | | | | SADTSKNTAYLQMNSLRAEDTAVYYCARWGHSTSP |
| | | | | WAMDYWGQGTLVTVSSASTKGPEVQLQQSGPELEK |
| | | | | PGASVKISCKASGYSFTGYNMNWVKQSNGKSLEWI |
| | | | | GNIDPYFGGTNYNQKFKGKATLTVDKSSSTAYMQL |
| | | | | KSLTSEDSAVYYCARNYDYDGGCFDYWGQGTTLTV |
| | | | | SS |
| 595 | DVD516L | AB071 | AB073 | DIQMTQSPSSLSASVGDRVTITCRASQVIRRSLAW |
| | | | | YQQKPGKAPKLLIYAASNLASGVPSRFSGSGSGTD |
| | | | | FTLTISSLQPEDFATYYCQQSNTSPLTFGQGTKVE |
| | | | | IKRTVAAPQAVVTQESALTTSPGETVTLTCRSSTG |
| | | | | AVTTSNYANWVQEKPDHLFTGLIGGTNNRAPGVPA |
| | | | | RFSGSLIGDKAALTITGAQTEDEAIYFCALWYSNH |
| | | | | WVFGGGTKLTVLG |

### Example 2.122

### Generation of VEGF (Seq. 3) and DLL4 (Seq. 4) DVD-Igs with Linker Set 2

TABLE 175

| | DVD | Outer | Inner | |
|---|---|---|---|---|
| SEQ | Variable | Variable | Variable | |
| ID | Domain | Domain | Domain | Sequence |
| NO | Name | Name | Name | 12345678901234567890123456789012345 |
| 596 | DVD521H | AB073 | AB071 | EVQLQQSGPELEKPGASVKISCKASGYSFTGYNMN |
| | | | | WVKQSNGKSLEWIGNIDPYFGGTNYNQKFKGKATL |
| | | | | TVDKSSSTAYMQLKSLTSEDSAVYYCARNYDYDGG |
| | | | | CFDYWGQGTTLTVSSASTKGPSVFPLAPEVQLVES |
| | | | | GGGLVQPGGSLRLSCAASGFTINASWIHWVRQAPG |
| | | | | KGLEWVGAIYPYSGYTNYADSVKGRFTISADTSKN |
| | | | | TAYLQMNSLRAEDTAVYYCARWGHSTSPWAMDYWG |
| | | | | QGTLVTVSS |
| 597 | DVD521L | AB073 | AB071 | QAVVTQESALTTSPGETVTLTCRSSTGAVTTSNYA |
| | | | | NWVQEKPDHLFTGLIGGTNNRAPGVPARFSGSLIG |
| | | | | DKAALTITGAQTEDEAIYFCALWYSNHWVFGGGTK |
| | | | | LTVLGQPKAAPSVTLFPPDIQMTQSPSSLSASVGD |
| | | | | RVTITCRASQVIRRSLAWYQQKPGKAPKLLIYAAS |
| | | | | NLASGVPSRFSGSGSGTDFTLTISSLQPEDFATYY |
| | | | | CQQSNTSPLTFGQGTKVEIKR |
| 598 | DVD522H | AB071 | AB073 | EVQLVESGGGLVQPGGSLRLSCAASGFTINASWIH |
| | | | | WVRQAPGKGLEWVGAIYPYSGYTNYADSVKGRFTI |
| | | | | SADTSKNTAYLQMNSLRAEDTAVYYCARWGHSTSP |
| | | | | WAMDYWGQGTLVTVSSASTKGPSVFPLAPEVQLQQ |
| | | | | SGPELEKPGASVKISCKASGYSFTGYNMNWVKQSN |
| | | | | GKSLEWIGNIDPYFGGTNYNQKFKGKATLTVDKSS |
| | | | | STAYMQLKSLTSEDSAVYYCARNYDYDGGCFDYWG |
| | | | | QGTTLTVSS |
| 599 | DVD522L | AB071 | AB073 | DIQMTQSPSSLSASVGDRVTITCRASQVIRRSLAW |
| | | | | YQQKPGKAPKLLIYAASNLASGVPSRFSGSGSGTD |
| | | | | FTLTISSLQPEDFATYYCQQSNTSPLTFGQGTKVE |
| | | | | IKRTVAAPSVFIFPPQAVVTQESALTTSPGETVTL |
| | | | | TCRSSTGAVTTSNYANWVQEKPDHLFTGLIGGTNN |
| | | | | RAPGVPARFSGSLIGDKAALTITGAQTEDEAIYFC |
| | | | | ALWYSNHWVFGGGTKLTVLG |

### Example 2.123

### Generation of VEGF (Seq. 3) and DLL4 (Seq. 4) DVD-Igs with Linker Set 3

TABLE 176

| | DVD | Outer | Inner | |
|---|---|---|---|---|
| SEQ | Variable | Variable | Variable | |
| ID | Domain | Domain | Domain | Sequence |
| NO | Name | Name | Name | 12345678901234567890123456789012345 |

| | | | | |
|---|---|---|---|---|
| 600 | DVD527H | AB073 | AB071 | EVQLQQSGPELEKPGASVKISCKASGYSFTGYNMN |
| | | | | WVKQSNGKSLEWIGNIDPYFGGTNYNQKFKGKATL |
| | | | | TVDKSSSTAYMQLKSLTSEDSAVYYCARNYDYDGG |
| | | | | CFDYWGQGTTLTVSSASTKGPSVFPLAPEVQLVES |
| | | | | GGGLVQPGGSLRLSCAASGFTINASWIHWVRQAPG |
| | | | | KGLEWVGAIYPYSGYTNYADSVKGRFTISADTSKN |
| | | | | TAYLQMNSLRAEDTAVYYCARWGHSTSPWAMDYWG |
| | | | | QGTLVTVSS |
| 601 | DVD527L | AB073 | AB071 | QAVVTQESALTTSPGETVTLTCRSSTGAVTTSNYA |
| | | | | NWVQEKPDHLFTGLIGGTNNRAPGVPARFSGSLIG |
| | | | | DKAALTITGAQTEDEAIYFCALWYSNHWVFGGGTK |
| | | | | LTVLGQPKAAPDIQMTQSPSSLSASVGDRVTITCR |
| | | | | ASQVIRRSLAWYQQKPGKAPKLLIYAASNLASGVP |
| | | | | SRFSGSGSGTDFTLTISSLQPEDFATYYCQQSNTS |
| | | | | PLTFGQGTKVEIKR |
| 602 | DVD528H | AB071 | AB073 | EVQLVESGGGLVQPGGSLRLSCAASGFTINASWIH |
| | | | | WVRQAPGKGLEWVGAIYPYSGYTNYADSVKGRFTI |
| | | | | SADTSKNTAYLQMNSLRAEDTAVYYCARWGHSTSP |
| | | | | WAMDYWGQGTLVTVSSASTKGPSVFPLAPEVQLQQ |
| | | | | SGPELEKPGASVKISCKASGYSFTGYNMNWVKQSN |
| | | | | GKSLEWIGNIDPYFGGTNYNQKFKGKATLTVDKSS |
| | | | | STAYMQLKSLTSEDSAVYYCARNYDYDGGCFDYWG |
| | | | | QGTTLTVSS |
| 603 | DVD528L | AB071 | AB073 | DIQMTQSPSSLSASVGDRVTITCRASQVIRRSLAW |
| | | | | YQQKPGKAPKLLIYAASNLASGVPSRFSGSGSGTD |
| | | | | FTLTISSLQPEDFATYYCQQSNTSPLTFGQGTKVE |
| | | | | IKRTVAAPQAVVTQESALTTSPGETVTLTCRSSTG |
| | | | | AVTTSNYANWVQEKPDHLFTGLIGGTNNRAPGVPA |
| | | | | RFSGSLIGDKAALTITGAQTEDEAIYFCALWYSNH |
| | | | | WVFGGGTKLTVLG |

### Example 2.124

### Generation of VEGF (Seq. 3) and DLL4 (Seq. 4) DVD-Igs with Linker Set 4

TABLE 177

| | DVD | Outer | Inner | |
|---|---|---|---|---|
| SEQ | Variable | Variable | Variable | |
| ID | Domain | Domain | Domain | Sequence |
| NO | Name | Name | Name | 12345678901234567890123456789012345 |
| 604 | DVD533H | AB073 | AB071 | EVQLQQSGPELEKPGASVKISCKASGYSFTGYNMN |
| | | | | WVKQSNGKSLEWIGNIDPYFGGTNYNQKFKGKATL |
| | | | | TVDKSSSTAYMQLKSLTSEDSAVYYCARNYDYDGG |
| | | | | CFDYWGQGTTLTVSSASTKGPEVQLVESGGGLVQP |
| | | | | GGSLRLSCAASGFTINASWIHWVRQAPGKGLEWVG |
| | | | | AIYPYSGYTNYADSVKGRFTISADTSKNTAYLQMN |
| | | | | SLRAEDTAVYYCARWGHSTSPWAMDYWGQGTLVTV |
| | | | | SS |
| 605 | DVD533L | AB073 | AB071 | QAVVTQESALTTSPGETVTLTCRSSTGAVTTSNYA |
| | | | | NWVQEKPDHLFTGLIGGTNNRAPGVPARFSGSLIG |
| | | | | DKAALTITGAQTEDEAIYFCALWYSNHWVFGGGTK |
| | | | | LTVLGQPKAAPSVTLFPPDIQMTQSPSSLSASVGD |
| | | | | RVTITCRASQVIRRSLAWYQQKPGKAPKLLIYAAS |
| | | | | NLASGVPSRFSGSGSGTDFTLTISSLQPEDFATYY |
| | | | | CQQSNTSPLTFGQGTKVEIKR |
| 606 | DVD534H | AB071 | AB073 | EVQLVESGGGLVQPGGSLRLSCAASGFTINASWIH |
| | | | | WVRQAPGKGLEWVGAIYPYSGYTNYADSVKGRFTI |
| | | | | SADTSKNTAYLQMNSLRAEDTAVYYCARWGHSTSP |
| | | | | WAMDYWGQGTLVTVSSASTKGPEVQLQQSGPELEK |
| | | | | PGASVKISCKASGYSFTGYNMNWVKQSNGKSLEWI |
| | | | | GNIDPYFGGTNYNQKFKGKATLTVDKSSSTAYMQL |
| | | | | KSLTSEDSAVYYCARNYDYDGGCFDYWGQGTTLTV |
| | | | | SS |
| 607 | DVD534L | AB071 | AB073 | DIQMTQSPSSLSASVGDRVTITCRASQVIRRSLAW |
| | | | | YQQKPGKAPKLLIYAASNLASGVPSRFSGSGSGTD |
| | | | | FTLTISSLQPEDFATYYCQQSNTSPLTFGQGTKVE |
| | | | | IKRTVAAPSVFIFPPQAVVTQESALTTSPGETVTL |
| | | | | TCRSSTGAVTTSNYANWVQEKPDHLFTGLIGGTNN |
| | | | | RAPGVPARFSGSLIGDKAALTITGAQTEDEAIYFC |
| | | | | ALWYSNHWVFGGGTKLTVLG |

### Example 2.125

### Generation of HER2 (Seq. 1) and ErbB3 (Seq. 1) DVD-Igs with Linker Set 1

TABLE 178

| | DVD | Outer | Inner | |
|---|---|---|---|---|
| SEQ | Variable | Variable | Variable | |
| ID | Domain | Domain | Domain | Sequence |
| NO | Name | Name | Name | 12345678901234567890123456789012345 |
| 608 | DVD387H | AB062 | AB004 | QVQLQQWGAGLLKPSETLSLTCAVYGGSFSGYYWS |
| | | | | WIRQPPGKGLEWIGEINHSGSTNYNPSLKSRVTIS |
| | | | | VETSKNQFSLKLSSVTAADTAVYYCARDKWTWYFD |
| | | | | LWGRGTLVTVSSASTKGPSVFPLAPEVQLVESGGG |
| | | | | LVQPGGSLRLSCAASGFNIKDTYIHWVRQAPGKGL |
| | | | | EWVARIYPTNGYTRYADSVKGRFTISADTSKNTAY |
| | | | | LQMNSLRAEDTAVYYCSRWGGDGFYAMDYWGQGTL |
| | | | | VTVSS |
| 609 | DVD387L | AB062 | AB004 | DIEMTQSPDSLAVSLGERATINCRSSQSVLYSSSN |
| | | | | RNYLAWYQQNPGQPPKLLIYWASTRESGVPDRFSG |
| | | | | SGSGTDFTLTISSLQAEDVAVYYCQQYYSTPRTFG |
| | | | | QGTKVEIKRTVAAPSVFIFPPDIQMTQSPSSLSAS |
| | | | | VGDRVTITCRASQDVNTAVAWYQQKPGKAPKLLIY |
| | | | | SASFLYSGVPSRFSGSRSGTDFTLTISSLQPEDFA |
| | | | | TYYCQQHYTTPPTFGQGTKVEIKR |
| 610 | DVD388H | AB004 | AB062 | EVQLVESGGGLVQPGGSLRLSCAASGFNIKDTYIH |
| | | | | WVRQAPGKGLEWVARIYPTNGYTRYADSVKGRFTI |
| | | | | SADTSKNTAYLQMNSLRAEDTAVYYCSRWGGDGFY |
| | | | | AMDYWGQGTLVTVSSASTKGPSVFPLAPQVQLQQW |
| | | | | GAGLLKPSETLSLTCAVYGGSFSGYYWSWIRQPPG |
| | | | | KGLEWIGEINHSGSTNYNPSLKSRVTISVETSKNQ |
| | | | | FSLKLSSVTAADTAVYYCARDKWTWYFDLWGRGTL |
| | | | | VTVSS |
| 611 | DVD388L | AB004 | AB062 | DIQMTQSPSSLSASVGDRVTITCRASQDVNTAVAW |
| | | | | YQQKPGKAPKLLIYSASFLYSGVPSRFSGSRSGTD |
| | | | | FTLTISSLQPEDFATYYCQQHYTTPPTFGQGTKVE |
| | | | | IKRTVAAPSVFIFPPDIEMTQSPDSLAVSLGERAT |
| | | | | INCRSSQSVLYSSSNRNYLAWYQQNPGQPPKLLIY |
| | | | | WASTRESGVPDRFSGSGSGTDFTLTISSLQAEDVA |
| | | | | VYYCQQYYSTPRTFGQGTKVEIKR |

### Example 2.126

### Generation of HER2 (Seq. 1) and ErbB3 (Seq. 1) DVD-Igs with Linker Set 2

TABLE 179

| | DVD | Outer | Inner | |
|---|---|---|---|---|
| SEQ | Variable | Variable | Variable | |
| ID | Domain | Domain | Domain | Sequence |
| NO | Name | Name | Name | 12345678901234567890123456789012345 |
| 612 | DVD391H | AB062 | AB004 | QVQLQQWGAGLLKPSETLSLTCAVYGGSFSGYYWS |
| | | | | WIRQPPGKGLEWIGEINHSGSTNYNPSLKSRVTIS |
| | | | | VETSKNQFSLKLSSVTAADTAVYYCARDKWTWYFD |
| | | | | LWGRGTLVTVSSASTKGPSVFPLAPEVQLVESGGG |
| | | | | LVQPGGSLRLSCAASGFNIKDTYIHWVRQAPGKGL |
| | | | | EWVARIYPTNGYTRYADSVKGRFTISADTSKNTAY |
| | | | | LQMNSLRAEDTAVYYCSRWGGDGFYAMDYWGQGTL |
| | | | | VTVSS |
| 613 | DVD391L | AB062 | AB004 | DIEMTQSPDSLAVSLGERATINCRSSQSVLYSSSN |
| | | | | RNYLAWYQQNPGQPPKLLIYWASTRESGVPDRFSG |
| | | | | SGSGTDFTLTISSLQAEDVAVYYCQQYYSTPRTFG |
| | | | | QGTKVEIKRTVAAPDIQMTQSPSSLSASVGDRVTI |
| | | | | TCRASQDVNTAVAWYQQKPGKAPKLLIYSASFLYS |
| | | | | GVPSRFSGSRSGTDFTLTISSLQPEDFATYYCQQH |
| | | | | YTTPPTFGQGTKVEIKR |
| 614 | DVD392H | AB004 | AB062 | EVQLVESGGGLVQPGGSLRLSCAASGFNIKDTYIH |
| | | | | WVRQAPGKGLEWVARIYPTNGYTRYADSVKGRFTI |
| | | | | SADTSKNTAYLQMNSLRAEDTAVYYCSRWGGDGFY |
| | | | | AMDYWGQGTLVTVSSASTKGPSVFPLAPQVQLQQW |
| | | | | GAGLLKPSETLSLTCAVYGGSFSGYYWSWIRQPPG |
| | | | | KGLEWIGEINHSGSTNYNPSLKSRVTISVETSKNQ |
| | | | | FSLKLSSVTAADTAVYYCARDKWTWYFDLWGRGTL |
| | | | | VTVSS |
| 615 | DVD392L | AB004 | AB062 | DIQMTQSPSSLSASVGDRVTITCRASQDVNTAVAW |
| | | | | YQQKPGKAPKLLIYSASFLYSGVPSRFSGSRSGTD |
| | | | | FTLTISSLQPEDFATYYCQQHYTTPPTFGQGTKVE |
| | | | | IKRTVAAPDIEMTQSPDSLAVSLGERATINCRSSQ |
| | | | | SVLYSSSNRNYLAWYQQNPGQPPKLLIYWASTRES |
| | | | | GVPDRFSGSGSGTDFTLTISSLQAEDVAVYYCQQY |
| | | | | YSTPRTFGQGTKVEIKR |

### Example 2.127

### Generation of HER2 (Seq. 1) and ErbB3 (Seq. 1) DVD-Igs with Linker Set 3

TABLE 180

| | DVD | Outer | Inner | |
|---|---|---|---|---|
| SEQ | Variable | Variable | Variable | |
| ID | Domain | Domain | Domain | Sequence |
| NO | Name | Name | Name | 12345678901234567890123456789012345 |
| 616 | DVD395H | AB062 | AB004 | QVQLQQWGAGLLKPSETLSLTCAVYGGSFSGYYWS |
| | | | | WIRQPPGKGLEWIGEINHSGSTNYNPSLKSRVTIS |
| | | | | VETSKNQFSLKLSSVTAADTAVYYCARDKWTWYFD |
| | | | | LWGRGTLVTVSSASTKGPEVQLVESGGGLVQPGGS |
| | | | | LRLSCAASGFNIKDTYIHWVRQAPGKGLEWVARIY |
| | | | | PTNGYTRYADSVKGRFTISADTSKNTAYLQMNSLR |
| | | | | AEDTAVYYCSRWGGDGFYAMDYWGQGTLVTVSS |
| 617 | DVD395L | AB062 | AB004 | DIEMTQSPDSLAVSLGERATINCRSSQSVLYSSSN |
| | | | | RNYLAWYQQNPGQPPKLLIYWASTRESGVPDRFSG |
| | | | | SGSGTDFTLTISSLQAEDVAVYYCQQYYSTPRTFG |
| | | | | QGTKVEIKRTVAAPSVFIFPPDIQMTQSPSSLSAS |
| | | | | VGDRVTITCRASQDVNTAVAWYQQKPGKAPKLLIY |
| | | | | SASFLYSGVPSRFSGSRSGTDFTLTISSLQPEDFA |
| | | | | TYYCQQHYTTPPTFGQGTKVEIKR |
| 618 | DVD396H | AB004 | AB062 | EVQLVESGGGLVQPGGSLRLSCAASGFNIKDTYIH |
| | | | | WVRQAPGKGLEWVARIYPTNGYTRYADSVKGRFTI |
| | | | | SADTSKNTAYLQMNSLRAEDTAVYYCSRWGGDGFY |
| | | | | AMDYWGQGTLVTVSSASTKGPQVQLQQWGAGLLKP |
| | | | | SETLSLTCAVYGGSFSGYYWSWIRQPPGKGLEWIG |
| | | | | EINHSGSTNYNPSLKSRVTISVETSKNQFSLKLSS |
| | | | | VTAADTAVYYCARDKWTWYFDLWGRGTLVTVSS |
| 619 | DVD396L | AB004 | AB062 | DIQMTQSPSSLSASVGDRVTITCRASQDVNTAVAW |
| | | | | YQQKPGKAPKLLIYSASFLYSGVPSRFSGSRSGTD |
| | | | | FTLTISSLQPEDFATYYCQQHYTTPPTFGQGTKVE |
| | | | | IKRTVAAPSVFIFPPDIEMTQSPDSLAVSLGERAT |
| | | | | INCRSSQSVLYSSSNRNYLAWYQQNPGQPPKLLIY |
| | | | | WASTRESGVPDRFSGSGSGTDFTLTISSLQAEDVA |
| | | | | VYYCQQYYSTPRTFGQGTKVEIKR |

### Example 2.128

### Generation of HER2 (Seq. 1) and ErbB3 (Seq. 1) DVD-Igs with Linker Set 4

TABLE 181

| | DVD | Outer | Inner | |
|---|---|---|---|---|
| SEQ | Variable | Variable | Variable | |
| ID | Domain | Domain | Domain | Sequence |
| NO | Name | Name | Name | 12345678901234567890123456789012345 |
| 620 | DVD683H | AB062 | AB004 | QVQLQQWGAGLLKPSETLSLTCAVYGGSFSGYYWS |
| | | | | WIRQPPGKGLEWIGEINHSGSTNYNPSLKSRVTIS |
| | | | | VETSKNQFSLKLSSVTAADTAVYYCARDKWTWYFD |
| | | | | LWGRGTLVTVSSASTKGPEVQLVESGGGLVQPGGS |
| | | | | LRLSCAASGFNIKDTYIHWVRQAPGKGLEWVARIY |
| | | | | PTNGYTRYADSVKGRFTISADTSKNTAYLQMNSLR |
| | | | | AEDTAVYYCSRWGGDGFYAMDYWGQGTLVTVSS |
| 621 | DVD683L | AB062 | AB004 | DIEMTQSPDSLAVSLGERATINCRSSQSVLYSSSN |
| | | | | RNYLAWYQQNPGQPPKLLIYWASTRESGVPDRFSG |
| | | | | SGSGTDFTLTISSLQAEDVAVYYCQQYYSTPRTFG |
| | | | | QGTKVEIKRTVAAPDIQMTQSPSSLSASVGDRVTI |
| | | | | TCRASQDVNTAVAWYQQKPGKAPKLLIYSASFLYS |
| | | | | GVPSRFSGSRSGTDFTLTISSLQPEDFATYYCQQH |
| | | | | YTTPPTFGQGTKVEIKR |
| 622 | DVD684H | AB004 | AB062 | EVQLVESGGGLVQPGGSLRLSCAASGFNIKDTYIH |
| | | | | WVRQAPGKGLEWVARIYPTNGYTRYADSVKGRFTI |
| | | | | SADTSKNTAYLQMNSLRAEDTAVYYCSRWGGDGFY |
| | | | | AMDYWGQGTLVTVSSASTKGPQVQLQQWGAGLLKP |
| | | | | SETLSLTCAVYGGSFSGYYWSWIRQPPGKGLEWIG |
| | | | | EINHSGSTNYNPSLKSRVTISVETSKNQFSLKLSS |
| | | | | VTAADTAVYYCARDKWTWYFDLWGRGTLVTVSS |
| 623 | DVD684L | AB004 | AB062 | DIQMTQSPSSLSASVGDRVTITCRASQDVNTAVAW |
| | | | | YQQKPGKAPKLLIYSASFLYSGVPSRFSGSRSGTD |
| | | | | FTLTISSLQPEDFATYYCQQHYTTPPTFGQGTKVE |
| | | | | IKRTVAAPDIEMTQSPDSLAVSLGERATINCRSSQ |
| | | | | SVLYSSSNRNYLAWYQQNPGQPPKLLIYWASTRES |
| | | | | GVPDRFSGSGSGTDFTLTISSLQAEDVAVYYCQQY |
| | | | | YSTPRTFGQGTKVEIKR |

### Example 2.129

### Generation of HER2 (Seq. 1) and ErbB3 (Seq. 2) DVD-Igs with Linker Set 1

TABLE 182

| | DVD | Outer | Inner | |
|---|---|---|---|---|
| SEQ | Variable | Variable | Variable | |
| ID | Domain | Domain | Domain | Sequence |
| NO | Name | Name | Name | 12345678901234567890123456789012345 |
| 624 | DVD399H | AB063 | AB004 | EVQLVESGGGLVQPGGSLRLSCAASGFTFSIYSMN |
| | | | | WVRQAPGKGLEWVSYISSSSSTIYYADSVKGRFTI |
| | | | | SRDNAKNSLYLQMNSLRDEDTAVYYCARDRGDFDA |
| | | | | FDIWGQGTMVTVSSASTKGPSVFPLAPEVQLVESG |
| | | | | GGLVQPGGSLRLSCAASGFNIKDTYIHWVRQAPGK |
| | | | | GLEWVARIYPTNGYTRYADSVKGRFTISADTSKNT |
| | | | | AYLQMNSLRAEDTAVYYCSRWGGDGFYAMDYWGQG |
| | | | | TLVTVSS |
| 625 | DVD399L | AB063 | AB004 | DIQMTQSPSSLSASVGDRVTITCQASQDITNYLNW |
| | | | | YQQKPGKAPKLLIYDASNLETGVPSRFSGSGSGTD |
| | | | | FTFTISSLQPEDIATYNCQQCENFPITFGQGTRLE |
| | | | | IKRTVAAPSVFIFPPDIQMTQSPSSLSASVGDRVT |
| | | | | ITCRASQDVNTAVAWYQQKPGKAPKLLIYSASFLY |
| | | | | SGVPSRFSGSRSGTDFTLTISSLQPEDFATYYCQQ |
| | | | | HYTTPPTFGQGTKVEIKR |
| 626 | DVD400H | AB004 | AB063 | EVQLVESGGGLVQPGGSLRLSCAASGFNIKDTYIH |
| | | | | WVRQAPGKGLEWVARIYPTNGYTRYADSVKGRFTI |
| | | | | SADTSKNTAYLQMNSLRAEDTAVYYCSRWGGDGFY |
| | | | | AMDYWGQGTLVTVSSASTKGPSVFPLAPEVQLVES |
| | | | | GGGLVQPGGSLRLSCAASGFTFSIYSMNWVRQAPG |
| | | | | KGLEWVSYISSSSSTIYYADSVKGRFTISRDNAKN |
| | | | | SLYLQMNSLRDEDTAVYYCARDRGDFDAFDIWGQG |
| | | | | TMVTVSS |
| 627 | DVD400L | AB004 | AB063 | DIQMTQSPSSLSASVGDRVTITCRASQDVNTAVAW |
| | | | | YQQKPGKAPKLLIYSASFLYSGVPSRFSGSRSGTD |
| | | | | FTLTISSLQPEDFATYYCQQHYTTPPTFGQGTKVE |
| | | | | IKRTVAAPSVFIFPPDIQMTQSPSSLSASVGDRVT |
| | | | | ITCQASQDITNYLNWYQQKPGKAPKLLIYDASNLE |
| | | | | TGVPSRFSGSGSGTDFTFTISSLQPEDIATYNCQQ |
| | | | | CENFPITFGQGTRLEIKR |

### Example 2.130

### Generation of HER2 (Seq. 1) and ErbB3 (Seq. 2) DVD-Igs with Linker Set 2

TABLE 183

| | DVD | Outer | Inner | |
|---|---|---|---|---|
| SEQ | Variable | Variable | Variable | |
| ID | Domain | Domain | Domain | Sequence |
| NO | Name | Name | Name | 12345678901234567890123456789012345 |
| 628 | DVD403H | AB063 | AB004 | EVQLVESGGGLVQPGGSLRLSCAASGFTFSIYSMN |
| | | | | WVRQAPGKGLEWVSYISSSSSTIYYADSVKGRFTI |
| | | | | SRDNAKNSLYLQMNSLRDEDTAVYYCARDRGDFDA |
| | | | | FDIWGQGTMVTVSSASTKGPSVFPLAPEVQLVESG |
| | | | | GGLVQPGGSLRLSCAASGFNIKDTYIHWVRQAPGK |
| | | | | GLEWVARIYPTNGYTRYADSVKGRFTISADTSKNT |
| | | | | AYLQMNSLRAEDTAVYYCSRWGGDGFYAMDYWGQG |
| | | | | TLVTVSS |
| 629 | DVD403L | AB063 | AB004 | DIQMTQSPSSLSASVGDRVTITCQASQDITNYLNW |
| | | | | YQQKPGKAPKLLIYDASNLETGVPSRFSGSGSGTD |
| | | | | FTFTISSLQPEDIATYNCQQCENFPITFGQGTRLE |
| | | | | IKRTVAAPDIQMTQSPSSLSASVGDRVTITCRASQ |
| | | | | DVNTAVAWYQQKPGKAPKLLIYSASFLYSGVPSRF |
| | | | | SGSRSGTDFTLTISSLQPEDFATYYCQQHYTTPPT |
| | | | | FGQGTKVEIKR |
| 630 | DVD404H | AB004 | AB063 | EVQLVESGGGLVQPGGSLRLSCAASGFNIKDTYIH |
| | | | | WVRQAPGKGLEWVARIYPTNGYTRYADSVKGRFTI |
| | | | | SADTSKNTAYLQMNSLRAEDTAVYYCSRWGGDGFY |
| | | | | AMDYWGQGTLVTVSSASTKGPSVFPLAPEVQLVES |
| | | | | GGGLVQPGGSLRLSCAASGFTFSIYSMNWVRQAPG |
| | | | | KGLEWVSYISSSSSTIYYADSVKGRFTISRDNAKN |
| | | | | SLYLQMNSLRDEDTAVYYCARDRGDFDAFDIWGQG |
| | | | | TMVTVSS |
| 631 | DVD404L | AB004 | AB063 | DIQMTQSPSSLSASVGDRVTITCRASQDVNTAVAW |
| | | | | YQQKPGKAPKLLIYSASFLYSGVPSRFSGSRSGTD |
| | | | | FTLTISSLQPEDFATYYCQQHYTTPPTFGQGTKVE |
| | | | | IKRTVAAPDIQMTQSPSSLSASVGDRVTITCQASQ |
| | | | | DITNYLNWYQQKPGKAPKLLIYDASNLETGVPSRF |
| | | | | SGSGSGTDFTFTISSLQPEDIATYNCQQCENFPIT |
| | | | | FGQGTRLEIKR |

### Example 2.131

### Generation of HER2 (Seq. 1) and ErbB3 (Seq. 2) DVD-Igs with Linker Set 3

TABLE 184

| | DVD | Outer | Inner | |
|---|---|---|---|---|
| SEQ | Variable | Variable | Variable | |
| ID | Domain | Domain | Domain | Sequence |
| NO | Name | Name | Name | 12345678901234567890123456789012345 |
| 632 | DVD407H | AB063 | AB004 | EVQLVESGGGLVQPGGSLRLSCAASGFTFSIYSMN |
| | | | | WVRQAPGKGLEWVSYISSSSSTIYYADSVKGRFTI |
| | | | | SRDNAKNSLYLQMNSLRDEDTAVYYCARDRGDFDA |
| | | | | FDIWGQGTMVTVSSASTKGPEVQLVESGGGLVQPG |
| | | | | GSLRLSCAASGFNIKDTYIHWVRQAPGKGLEWVAR |
| | | | | IYPTNGYTRYADSVKGRFTISADTSKNTAYLQMNS |
| | | | | LRAEDTAVYYCSRWGGDGFYAMDYWGQGTLVTVSS |
| 633 | DVD407L | AB063 | AB004 | DIQMTQSPSSLSASVGDRVTITCQASQDITNYLNW |
| | | | | YQQKPGKAPKLLIYDASNLETGVPSRFSGSGSGTD |
| | | | | FTFTISSLQPEDIATYNCQQCENFPITFGQGTRLE |
| | | | | IKRTVAAPSVFIFPPDIQMTQSPSSLSASVGDRVT |
| | | | | ITCRASQDVNTAVAWYQQKPGKAPKLLIYSASFLY |
| | | | | SGVPSRFSGSRSGTDFTLTISSLQPEDFATYYCQQ |
| | | | | HYTTPPTFGQGTKVEIKR |
| 634 | DVD408H | AB004 | AB063 | EVQLVESGGGLVQPGGSLRLSCAASGFNIKDTYIH |
| | | | | WVRQAPGKGLEWVARIYPTNGYTRYADSVKGRFTI |
| | | | | SADTSKNTAYLQMNSLRAEDTAVYYCSRWGGDGFY |
| | | | | AMDYWGQGTLVTVSSASTKGPEVQLVESGGGLVQP |
| | | | | GGSLRLSCAASGFTFSIYSMNWVRQAPGKGLEWVS |
| | | | | YISSSSSTIYYADSVKGRFTISRDNAKNSLYLQMN |
| | | | | SLRDEDTAVYYCARDRGDFDAFDIWGQGTMVTVSS |
| 635 | DVD408L | AB004 | AB063 | DIQMTQSPSSLSASVGDRVTITCRASQDVNTAVAW |
| | | | | YQQKPGKAPKLLIYSASFLYSGVPSRFSGSRSGTD |
| | | | | FTLTISSLQPEDFATYYCQQHYTTPPTFGQGTKVE |
| | | | | IKRTVAAPSVFIFPPDIQMTQSPSSLSASVGDRVT |
| | | | | ITCQASQDITNYLNWYQQKPGKAPKLLIYDASNLE |
| | | | | TGVPSRFSGSGSGTDFTFTISSLQPEDIATYNCQQ |
| | | | | CENFPITFGQGTRLEIKR |

### Example 2.132

### Generation of HER2 (Seq. 1) and ErbB3 (Seq. 2) DVD-Igs with Linker Set 4

TABLE 185

| | DVD | Outer | Inner | |
|---|---|---|---|---|
| SEQ | Variable | Variable | Variable | |
| ID | Domain | Domain | Domain | Sequence |
| NO | Name | Name | Name | 12345678901234567890123456789012345 |
| 636 | DVD685H | AB063 | AB004 | EVQLVESGGGLVQPGGSLRLSCAASGFTFSIYSMN |
| | | | | WVRQAPGKGLEWVSYISSSSSTIYYADSVKGRFTI |
| | | | | SRDNAKNSLYLQMNSLRDEDTAVYYCARDRGDFDA |
| | | | | FDIWGQGTMVTVSSASTKGPEVQLVESGGGLVQPG |
| | | | | GSLRLSCAASGFNIKDTYIHWVRQAPGKGLEWVAR |
| | | | | IYPTNGYTRYADSVKGRFTISADTSKNTAYLQMNS |
| | | | | LRAEDTAVYYCSRWGGDGFYAMDYWGQGTLVTVSS |
| 637 | DVD685L | AB063 | AB004 | DIQMTQSPSSLSASVGDRVTITCQASQDITNYLNW |
| | | | | YQQKPGKAPKLLIYDASNLETGVPSRFSGSGSGTD |
| | | | | FTFTISSLQPEDIATYNCQQCENFPITFGQGTRLE |
| | | | | IKRTVAAPDIQMTQSPSSLSASVGDRVTITCRASQ |
| | | | | DVNTAVAWYQQKPGKAPKLLIYSASFLYSGVPSRF |
| | | | | SGSRSGTDFTLTISSLQPEDFATYYCQQHYTTPPT |
| | | | | FGQGTKVEIKR |
| 638 | DVD686H | AB004 | AB063 | EVQLVESGGGLVQPGGSLRLSCAASGFNIKDTYIH |
| | | | | WVRQAPGKGLEWVARIYPTNGYTRYADSVKGRFTI |
| | | | | SADTSKNTAYLQMNSLRAEDTAVYYCSRWGGDGFY |
| | | | | AMDYWGQGTLVTVSSASTKGPEVQLVESGGGLVQP |
| | | | | GGSLRLSCAASGFTFSIYSMNWVRQAPGKGLEWVS |
| | | | | YISSSSSTIYYADSVKGRFTISRDNAKNSLYLQMN |
| | | | | SLRDEDTAVYYCARDRGDFDAFDIWGQGTMVTVSS |
| 639 | DVD686L | AB004 | AB063 | DIQMTQSPSSLSASVGDRVTITCRASQDVNTAVAW |
| | | | | YQQKPGKAPKLLIYSASFLYSGVPSRFSGSRSGTD |
| | | | | FTLTISSLQPEDFATYYCQQHYTTPPTFGQGTKVE |
| | | | | IKRTVAAPDIQMTQSPSSLSASVGDRVTITCQASQ |
| | | | | DITNYLNWYQQKPGKAPKLLIYDASNLETGVPSRF |
| | | | | SGSGSGTDFTFTISSLQPEDIATYNCQQCENFPIT |
| | | | | FGQGTRLEIKR |

### Example 2.133

### Generation of EGFR (Seq. 2) and ErbB3 (Seq. 3) DVD-Igs with Linker Set 1

TABLE 186

| | DVD | Outer | Inner | |
|---|---|---|---|---|
| SEQ | Variable | Variable | Variable | |
| ID | Domain | Domain | Domain | Sequence |
| NO | Name | Name | Name | 12345678901234567890123456789012345 |
| 640 | DVD409H | AB067 | AB033 | EVQLLESGGGLVQPGGSLRLSCAASGFTFSHYVMA |
| | | | | WVRQAPGKGLEWVSSISSSGGWTLYADSVKGRFTI |
| | | | | SRDNSKNTLYLQMNSLRAEDTAVYYCTRGLKMATI |
| | | | | FDYWGQGTLVTVSSASTKGPQVQLKQSGPGLVQPS |
| | | | | QSLSITCTVSGFSLTNYGVHWVRQSPGKGLEWLGV |
| | | | | IWSGGNTDYNTPFTSRLSINKDNSKSQVFFKMNSL |
| | | | | QSNDTAIYYCARALTYYDYEFAYWGQGTLVTVSA |
| 641 | DVD409L | AB067 | AB033 | QSALTQPASVSGSPGQSITISCTGTSSDVGSYNVV |
| | | | | SWYQQHPGKAPKLIIYEVSQRPSGVSNRFSGSKSG |
| | | | | NTASLTISGLQTEDEADYYCCSYAGSSIFVIFGGG |
| | | | | TKVTVLGQPKAAPDILLTQSPVILSVSPGERVSFS |
| | | | | CRASQSIGTNIHWYQQRTNGSPRLLIKYASESISG |
| | | | | IPSRFSGSGSGTDFTLSINSVESEDIADYYCQQNN |
| | | | | NWPTTFGAGTKLELKR |
| 642 | DVD410H | AB033 | AB067 | QVQLKQSGPGLVQPSQSLSITCTVSGFSLTNYGVH |
| | | | | WVRQSPGKGLEWLGVIWSGGNTDYNTPFTSRLSIN |
| | | | | KDNSKSQVFFKMNSLQSNDTAIYYCARALTYYDYE |
| | | | | FAYWGQGTLVTVSAASTKGPEVQLLESGGGLVQPG |
| | | | | GSLRLSCAASGFTFSHYVMAWVRQAPGKGLEWVSS |
| | | | | ISSSGGWTLYADSVKGRFTISRDNSKNTLYLQMNS |
| | | | | LRAEDTAVYYCTRGLKMATIFDYWGQGTLVTVSS |
| 643 | DVD410L | AB033 | AB067 | DILLTQSPVILSVSPGERVSFSCRASQSIGTNIHW |
| | | | | YQQRTNGSPRLLIKYASESISGIPSRFSGSGSGTD |
| | | | | FTLSINSVESEDIADYYCQQNNNWPTTFGAGTKLE |
| | | | | LKRTVAAPQSALTQPASVSGSPGQSITISCTGTSS |
| | | | | DVGSYNVVSWYQQHPGKAPKLIIYEVSQRPSGVSN |
| | | | | RFSGSKSGNTASLTISGLQTEDEADYYCCSYAGSS |
| | | | | IFVIFGGGTKVTVLG |

### Example 2.134

### Generation of EGFR (Seq. 2) and ErbB3 (Seq. 3) DVD-Igs with Linker Set 2

TABLE 187

| | DVD | Outer | Inner | |
|---|---|---|---|---|
| SEQ | Variable | Variable | Variable | |
| ID | Domain | Domain | Domain | Sequence |
| NO | Name | Name | Name | 12345678901234567890123456789012345 |
| 644 | DVD413H | AB067 | AB033 | EVQLLESGGGLVQPGGSLRLSCAASGFTFSHYVMA |
| | | | | WVRQAPGKGLEWVSSISSSGGWTLYADSVKGRFTI |
| | | | | SRDNSKNTLYLQMNSLRAEDTAVYYCTRGLKMATI |
| | | | | FDYWGQGTLVTVSSASTKGPSVFPLAPQVQLKQSG |
| | | | | PGLVQPSQSLSITCTVSGFSLTNYGVHWVRQSPGK |
| | | | | GLEWLGVIWSGGNTDYNTPFTSRLSINKDNSKSQV |
| | | | | FFKMNSLQSNDTAIYYCARALTYYDYEFAYWGQGT |
| | | | | LVTVSA |
| 645 | DVD413L | AB067 | AB033 | QSALTQPASVSGSPGQSITISCTGTSSDVGSYNVV |
| | | | | SWYQQHPGKAPKLIIYEVSQRPSGVSNRFSGSKSG |
| | | | | NTASLTISGLQTEDEADYYCCSYAGSSIFVIFGGG |
| | | | | TKVTVLGQPKAAPSVTLFPPDILLTQSPVILSVSP |
| | | | | GERVSFSCRASQSIGTNIHWYQQRTNGSPRLLIKY |
| | | | | ASESISGIPSRFSGSGSGTDFTLSINSVESEDIAD |
| | | | | YYCQQNNNWPTTFGAGTKLELKR |
| 646 | DVD414H | AB033 | AB067 | QVQLKQSGPGLVQPSQSLSITCTVSGFSLTNYGVH |
| | | | | WVRQSPGKGLEWLGVIWSGGNTDYNTPFTSRLSIN |
| | | | | KDNSKSQVFFKMNSLQSNDTAIYYCARALTYYDYE |
| | | | | FAYWGQGTLVTVSAASTKGPSVFPLAPEVQLLESG |
| | | | | GGLVQPGGSLRLSCAASGFTFSHYVMAWVRQAPGK |
| | | | | GLEWVSSISSSGGWTLYADSVKGRFTISRDNSKNT |
| | | | | LYLQMNSLRAEDTAVYYCTRGLKMATIFDYWGQGT |
| | | | | LVTVSS |
| 647 | DVD414L | AB033 | AB067 | DILLTQSPVILSVSPGERVSFSCRASQSIGTNIHW |
| | | | | YQQRTNGSPRLLIKYASESISGIPSRFSGSGSGTD |
| | | | | FTLSINSVESEDIADYYCQQNNNWPTTFGAGTKLE |
| | | | | LKRTVAAPSVFIFPPQSALTQPASVSGSPGQSITI |
| | | | | SCTGTSSDVGSYNVVSWYQQHPGKAPKLIIYEVSQ |
| | | | | RPSGVSNRFSGSKSGNTASLTISGLQTEDEADYYC |
| | | | | CSYAGSSIFVIFGGGTKVTVLG |

### Example 2.135

### Generation of EGFR (Seq. 2) and ErbB3 (Seq. 3) DVD-Igs with Linker Set 3

TABLE 188

| | DVD | Outer | Inner | |
|---|---|---|---|---|
| SEQ | Variable | Variable | Variable | |
| ID | Domain | Domain | Domain | Sequence |
| NO | Name | Name | Name | 12345678901234567890123456789012345 |
| 648 | DVD417H | AB067 | AB033 | EVQLLESGGGLVQPGGSLRLSCAASGFTFSHYVMA |
| | | | | WVRQAPGKGLEWVSSISSSGGWTLYADSVKGRFTI |
| | | | | SRDNSKNTLYLQMNSLRAEDTAVYYCTRGLKMATI |
| | | | | FDYWGQGTLVTVSSASTKGPSVFPLAPQVQLKQSG |
| | | | | PGLVQPSQSLSITCTVSGFSLTNYGVHWVRQSPGK |
| | | | | GLEWLGVIWSGGNTDYNTPFTSRLSINKDNSKSQV |
| | | | | FFKMNSLQSNDTAIYYCARALTYYDYEFAYWGQGT |
| | | | | LVTVSA |
| 649 | DVD417L | AB067 | AB033 | QSALTQPASVSGSPGQSITISCTGTSSDVGSYNVV |
| | | | | SWYQQHPGKAPKLIIYEVSQRPSGVSNRFSGSKSG |
| | | | | NTASLTISGLQTEDEADYYCCSYAGSSIFVIFGGG |
| | | | | TKVTVLGQPKAAPDILLTQSPVILSVSPGERVSFS |
| | | | | CRASQSIGTNIHWYQQRTNGSPRLLIKYASESISG |
| | | | | IPSRFSGSGSGTDFTLSINSVESEDIADYYCQQNN |
| | | | | NWPTTFGAGTKLELKR |
| 650 | DVD418H | AB033 | AB067 | QVQLKQSGPGLVQPSQSLSITCTVSGFSLTNYGVH |
| | | | | WVRQSPGKGLEWLGVIWSGGNTDYNTPFTSRLSIN |
| | | | | KDNSKSQVFFKMNSLQSNDTAIYYCARALTYYDYE |
| | | | | FAYWGQGTLVTVSAASTKGPSVFPLAPEVQLLESG |
| | | | | GGLVQPGGSLRLSCAASGFTFSHYVMAWVRQAPGK |
| | | | | GLEWVSSISSSGGWTLYADSVKGRFTISRDNSKNT |
| | | | | LYLQMNSLRAEDTAVYYCTRGLKMATIFDYWGQGT |
| | | | | LVTVSS |
| 651 | DVD418L | AB033 | AB067 | DILLTQSPVILSVSPGERVSFSCRASQSIGTNIHW |
| | | | | YQQRTNGSPRLLIKYASESISGIPSRFSGSGSGTD |
| | | | | FTLSINSVESEDIADYYCQQNNNWPTTFGAGTKLE |
| | | | | LKRTVAAPQSALTQPASVSGSPGQSITISCTGTSS |
| | | | | DVGSYNVVSWYQQHPGKAPKLIIYEVSQRPSGVSN |
| | | | | RFSGSKSGNTASLTISGLQTEDEADYYCCSYAGSS |
| | | | | IFVIFGGGTKVTVLG |

### Example 2.136

### Generation of EGFR (Seq. 2) and ErbB3 (Seq. 3) DVD-Igs with Linker Set 4

TABLE 189

| | DVD | Outer | Inner | |
|---|---|---|---|---|
| SEQ | Variable | Variable | Variable | |
| ID | Domain | Domain | Domain | Sequence |
| NO | Name | Name | Name | 12345678901234567890123456789012345 |
| 652 | DVD421H | AB067 | AB033 | EVQLLESGGGLVQPGGSLRLSCAASGFTFSHYVMA |
| | | | | WVRQAPGKGLEWVSSISSSGGWTLYADSVKGRFTI |
| | | | | SRDNSKNTLYLQMNSLRAEDTAVYYCTRGLKMATI |
| | | | | FDYWGQGTLVTVSSASTKGPQVQLKQSGPGLVQPS |
| | | | | QSLSITCTVSGFSLTNYGVHWVRQSPGKGLEWLGV |
| | | | | IWSGGNTDYNTPFTSRLSINKDNSKSQVFFKMNSL |
| | | | | QSNDTAIYYCARALTYYDYEFAYWGQGTLVTVSA |
| 653 | DVD421L | AB067 | AB033 | QSALTQPASVSGSPGQSITISCTGTSSDVGSYNVV |
| | | | | SWYQQHPGKAPKLIIYEVSQRPSGVSNRFSGSKSG |
| | | | | NTASLTISGLQTEDEADYYCCSYAGSSIFVIFGGG |
| | | | | TKVTVLGQPKAAPSVTLFPPDILLTQSPVILSVSP |
| | | | | GERVSFSCRASQSIGTNIHWYQQRTNGSPRLLIKY |
| | | | | ASESISGIPSRFSGSGSGTDFTLSINSVESEDIAD |
| | | | | YYCQQNNNWPTTFGAGTKLELKR |
| 654 | DVD422H | AB033 | AB067 | QVQLKQSGPGLVQPSQSLSITCTVSGFSLTNYGVH |
| | | | | WVRQSPGKGLEWLGVIWSGGNTDYNTPFTSRLSIN |
| | | | | KDNSKSQVFFKMNSLQSNDTAIYYCARALTYYDYE |
| | | | | FAYWGQGTLVTVSAASTKGPEVQLLESGGGLVQPG |
| | | | | GSLRLSCAASGFTFSHYVMAWVRQAPGKGLEWVSS |
| | | | | ISSSGGWTLYADSVKGRFTISRDNSKNTLYLQMNS |
| | | | | LRAEDTAVYYCTRGLKMATIFDYWGQGTLVTVSS |
| 655 | DVD422L | AB033 | AB067 | DILLTQSPVILSVSPGERVSFSCRASQSIGTNIHW |
| | | | | YQQRTNGSPRLLIKYASESISGIPSRFSGSGSGTD |
| | | | | FTLSINSVESEDIADYYCQQNNNWPTTFGAGTKLE |
| | | | | LKRTVAAPSVFIFPPQSALTQPASVSGSPGQSITI |
| | | | | SCTGTSSDVGSYNVVSWYQQHPGKAPKLIIYEVSQ |
| | | | | RPSGVSNRFSGSKSGNTASLTISGLQTEDEADYYC |
| | | | | CSYAGSSIFVIFGGGTKVTVLG |

### Example 2.137

### Generation of HER2 (Seq. 1) and ErbB3 (Seq. 3) DVD-Igs with Linker Set 1

TABLE 190

| | DVD | Outer | Inner | |
|---|---|---|---|---|
| SEQ | Variable | Variable | Variable | |
| ID | Domain | Domain | Domain | Sequence |
| NO | Name | Name | Name | 12345678901234567890123456789012345 |
| 656 | DVD411H | AB067 | AB004 | EVQLLESGGGLVQPGGSLRLSCAASGFTFSHYVMA |
| | | | | WVRQAPGKGLEWVSSISSSGGWTLYADSVKGRFTI |
| | | | | SRDNSKNTLYLQMNSLRAEDTAVYYCTRGLKMATI |
| | | | | FDYWGQGTLVTVSSASTKGPEVQLVESGGGLVQPG |
| | | | | GSLRLSCAASGFNIKDTYIHWVRQAPGKGLEWVAR |
| | | | | IYPTNGYTRYADSVKGRFTISADTSKNTAYLQMNS |
| | | | | LRAEDTAVYYCSRWGGDGFYAMDYWGQGTLVTVSS |
| 657 | DVD411L | AB067 | AB004 | QSALTQPASVSGSPGQSITISCTGTSSDVGSYNVV |
| | | | | SWYQQHPGKAPKLIIYEVSQRPSGVSNRFSGSKSG |
| | | | | NTASLTISGLQTEDEADYYCCSYAGSSIFVIFGGG |
| | | | | TKVTVLGQPKAAPDIQMTQSPSSLSASVGDRVTIT |
| | | | | CRASQDVNTAVAWYQQKPGKAPKLLIYSASFLYSG |
| | | | | VPSRFSGSRSGTDFTLTISSLQPEDFATYYCQQHY |
| | | | | TTPPTFGQGTKVEIKR |
| 658 | DVD412H | AB004 | AB067 | EVQLVESGGGLVQPGGSLRLSCAASGFNIKDTYIH |
| | | | | WVRQAPGKGLEWVARIYPTNGYTRYADSVKGRFTI |
| | | | | SADTSKNTAYLQMNSLRAEDTAVYYCSRWGGDGFY |
| | | | | AMDYWGQGTLVTVSSASTKGPEVQLLESGGGLVQP |
| | | | | GGSLRLSCAASGFTFSHYVMAWVRQAPGKGLEWVS |
| | | | | SISSSGGWTLYADSVKGRFTISRDNSKNTLYLQMN |
| | | | | SLRAEDTAVYYCTRGLKMATIFDYWGQGTLVTVSS |
| 659 | DVD412L | AB004 | AB067 | DIQMTQSPSSLSASVGDRVTITCRASQDVNTAVAW |
| | | | | YQQKPGKAPKLLIYSASFLYSGVPSRFSGSRSGTD |
| | | | | FTLTISSLQPEDFATYYCQQHYTTPPTFGQGTKVE |
| | | | | IKRTVAAPQSALTQPASVSGSPGQSITISCTGTSS |
| | | | | DVGSYNVVSWYQQHPGKAPKLIIYEVSQRPSGVSN |
| | | | | RFSGSKSGNTASLTISGLQTEDEADYYCCSYAGSS |
| | | | | IFVIFGGGTKVTVLG |

### Example 2.138

### Generation of HER2 (Seq. 1) and ErbB3 (Seq. 3) DVD-Igs with Linker Set 2

TABLE 191

| | DVD | Outer | Inner | |
|---|---|---|---|---|
| SEQ | Variable | Variable | Variable | |
| ID | Domain | Domain | Domain | Sequence |
| NO | Name | Name | Name | 12345678901234567890123456789012345 |
| 660 | DVD415H | AB067 | AB004 | EVQLLESGGGLVQPGGSLRLSCAASGFTFSHYVMA |
| | | | | WVRQAPGKGLEWVSSISSSGGWTLYADSVKGRFTI |
| | | | | SRDNSKNTLYLQMNSLRAEDTAVYYCTRGLKMATI |
| | | | | FDYWGQGTLVTVSSASTKGPSVFPLAPEVQLVESG |
| | | | | GGLVQPGGSLRLSCAASGFNIKDTYIHWVRQAPGK |
| | | | | GLEWVARIYPTNGYTRYADSVKGRFTISADTSKNT |
| | | | | AYLQMNSLRAEDTAVYYCSRWGGDGFYAMDYWGQG |
| | | | | TLVTVSS |
| 661 | DVD415L | AB067 | AB004 | QSALTQPASVSGSPGQSITISCTGTSSDVGSYNVV |
| | | | | SWYQQHPGKAPKLIIYEVSQRPSGVSNRFSGSKSG |
| | | | | NTASLTISGLQTEDEADYYCCSYAGSSIFVIFGGG |
| | | | | TKVTVLGQPKAAPSVTLFPPDIQMTQSPSSLSASV |
| | | | | GDRVTITCRASQDVNTAVAWYQQKPGKAPKLLIYS |
| | | | | ASFLYSGVPSRFSGSRSGTDFTLTISSLQPEDFAT |
| | | | | YYCQQHYTTPPTFGQGTKVEIKR |
| 662 | DVD416H | AB004 | AB067 | EVQLVESGGGLVQPGGSLRLSCAASGFNIKDTYIH |
| | | | | WVRQAPGKGLEWVARIYPTNGYTRYADSVKGRFTI |
| | | | | SADTSKNTAYLQMNSLRAEDTAVYYCSRWGGDGFY |
| | | | | AMDYWGQGTLVTVSSASTKGPSVFPLAPEVQLLES |
| | | | | GGGLVQPGGSLRLSCAASGFTFSHYVMAWVRQAPG |
| | | | | KGLEWVSSISSSGGWTLYADSVKGRFTISRDNSKN |
| | | | | TLYLQMNSLRAEDTAVYYCTRGLKMATIFDYWGQG |
| | | | | TLVTVSS |
| 663 | DVD416L | AB004 | AB067 | DIQMTQSPSSLSASVGDRVTITCRASQDVNTAVAW |
| | | | | YQQKPGKAPKLLIYSASFLYSGVPSRFSGSRSGTD |
| | | | | FTLTISSLQPEDFATYYCQQHYTTPPTFGQGTKVE |
| | | | | IKRTVAAPSVFIFPPQSALTQPASVSGSPGQSITI |
| | | | | SCTGTSSDVGSYNVVSWYQQHPGKAPKLIIYEVSQ |
| | | | | RPSGVSNRFSGSKSGNTASLTISGLQTEDEADYYC |
| | | | | CSYAGSSIFVIFGGGTKVTVLG |

### Example 2.139

### Generation of HER2 (Seq. 1) and ErbB3 (Seq. 3) DVD-Igs with Linker Set 3

TABLE 192

| | DVD | Outer | Inner | |
|---|---|---|---|---|
| SEQ | Variable | Variable | Variable | |
| ID | Domain | Domain | Domain | Sequence |
| NO | Name | Name | Name | 12345678901234567890123456789012345 |
| 664 | DVD419H | AB067 | AB004 | EVQLLESGGGLVQPGGSLRLSCAASGFTFSHYVMA |
| | | | | WVRQAPGKGLEWVSSISSSGGWTLYADSVKGRFTI |
| | | | | SRDNSKNTLYLQMNSLRAEDTAVYYCTRGLKMATI |
| | | | | FDYWGQGTLVTVSSASTKGPSVFPLAPEVQLVESG |
| | | | | GGLVQPGGSLRLSCAASGFNIKDTYIHWVRQAPGK |
| | | | | GLEWVARIYPTNGYTRYADSVKGRFTISADTSKNT |
| | | | | AYLQMNSLRAEDTAVYYCSRWGGDGFYAMDYWGQG |
| | | | | TLVTVSS |
| 665 | DVD419L | AB067 | AB004 | QSALTQPASVSGSPGQSITISCTGTSSDVGSYNVV |
| | | | | SWYQQHPGKAPKLIIYEVSQRPSGVSNRFSGSKSG |
| | | | | NTASLTISGLQTEDEADYYCCSYAGSSIFVIFGGG |
| | | | | TKVTVLGQPKAAPDIQMTQSPSSLSASVGDRVTIT |
| | | | | CRASQDVNTAVAWYQQKPGKAPKLLIYSASFLYSG |
| | | | | VPSRFSGSRSGTDFTLTISSLQPEDFATYYCQQHY |
| | | | | TTPPTFGQGTKVEIKR |
| 666 | DVD420H | AB004 | AB067 | EVQLVESGGGLVQPGGSLRLSCAASGFNIKDTYIH |
| | | | | WVRQAPGKGLEWVARIYPTNGYTRYADSVKGRFTI |
| | | | | SADTSKNTAYLQMNSLRAEDTAVYYCSRWGGDGFY |
| | | | | AMDYWGQGTLVTVSSASTKGPSVFPLAPEVQLLES |
| | | | | GGGLVQPGGSLRLSCAASGFTFSHYVMAWVRQAPG |
| | | | | KGLEWVSSISSSGGWTLYADSVKGRFTISRDNSKN |
| | | | | TLYLQMNSLRAEDTAVYYCTRGLKMATIFDYWGQG |
| | | | | TLVTVSS |
| 667 | DVD420L | AB004 | AB067 | DIQMTQSPSSLSASVGDRVTITCRASQDVNTAVAW |
| | | | | YQQKPGKAPKLLIYSASFLYSGVPSRFSGSRSGTD |
| | | | | FTLTISSLQPEDFATYYCQQHYTTPPTFGQGTKVE |
| | | | | IKRTVAAPQSALTQPASVSGSPGQSITISCTGTSS |
| | | | | DVGSYNVVSWYQQHPGKAPKLIIYEVSQRPSGVSN |
| | | | | RFSGSKSGNTASLTISGLQTEDEADYYCCSYAGSS |
| | | | | IFVIFGGGTKVTVLG |

### Example 2.140

### Generation of HER2 (Seq. 1) and ErbB3 (Seq. 3) DVD-Igs with Linker Set 4

TABLE 193

| | DVD | Outer | Inner | |
|---|---|---|---|---|
| SEQ | Variable | Variable | Variable | |
| ID | Domain | Domain | Domain | Sequence |
| NO | Name | Name | Name | 12345678901234567890123456789012345 |
| 668 | DVD423H | AB067 | AB004 | EVQLLESGGGLVQPGGSLRLSCAASGFTFSHYVMA |
| | | | | WVRQAPGKGLEWVSSISSSGGWTLYADSVKGRFTI |
| | | | | SRDNSKNTLYLQMNSLRAEDTAVYYCTRGLKMATI |
| | | | | FDYWGQGTLVTVSSASTKGPEVQLVESGGGLVQPG |
| | | | | GSLRLSCAASGFNIKDTYIHWVRQAPGKGLEWVAR |
| | | | | IYPTNGYTRYADSVKGRFTISADTSKNTAYLQMNS |
| | | | | LRAEDTAVYYCSRWGGDGFYAMDYWGQGTLVTVSS |
| 669 | DVD423L | AB067 | AB004 | QSALTQPASVSGSPGQSITISCTGTSSDVGSYNVV |
| | | | | SWYQQHPGKAPKLIIYEVSQRPSGVSNRFSGSKSG |
| | | | | NTASLTISGLQTEDEADYYCCSYAGSSIFVIFGGG |
| | | | | TKVTVLGQPKAAPSVTLFPPDIQMTQSPSSLSASV |
| | | | | GDRVTITCRASQDVNTAVAWYQQKPGKAPKLLIYS |
| | | | | ASFLYSGVPSRFSGSRSGTDFTLTISSLQPEDFAT |
| | | | | YYCQQHYTTPPTFGQGTKVEIKR |
| 670 | DVD424H | AB004 | AB067 | EVQLVESGGGLVQPGGSLRLSCAASGFNIKDTYIH |
| | | | | WVRQAPGKGLEWVARTYPTNGYTRYADSVKGRFTI |
| | | | | SADTSKNTAYLQMNSLRAEDTAVYYCSRWGGDGFY |
| | | | | AMDYWGQGTLVTVSSASTKGPEVQLLESGGGLVQP |
| | | | | GGSLRLSCAASGFTFSHYVMAWVRQAPGKGLEWVS |
| | | | | SISSSGGWTLYADSVKGRFTISRDNSKNTLYLQMN |
| | | | | SLRAEDTAVYYCTRGLKMATIFDYWGQGTLVTVSS |
| 671 | DVD424L | AB004 | AB067 | DIQMTQSPSSLSASVGDRVTITCRASQDVNTAVAW |
| | | | | YQQKPGKAPKLLIYSASFLYSGVPSRFSGSRSGTD |
| | | | | FTLTISSLQPEDFATYYCQQHYTTPPTFGQGTKVE |
| | | | | IKRTVAAPSVFIFPPQSALTQPASVSGSPGQSITI |
| | | | | SCTGTSSDVGSYNVVSWYQQHPGKAPKLIIYEVSQ |
| | | | | RPSGVSNRFSGSKSGNTASLTISGLQTEDEADYYC |
| | | | | CSYAGSSIFVIFGGGTKVTVLG |

### Example 2.141

### Generation of VEGF (Seq. 1) and PLGF (Seq. 2) DVD-Igs with Linker Set 1

TABLE 194

| | DVD | Outer | Inner | |
|---|---|---|---|---|
| SEQ | Variable | Variable | Variable | |
| ID | Domain | Domain | Domain | Sequence |
| NO | Name | Name | Name | 12345678901234567890123456789012345 |
| 672 | DVD541H | AB074VH | AB014VH | QVQLKQSGPGLVQPSQSLSITCTVSGFSLTTYGIH |
| | | | | WVRQSPGKGLEWLGVMWSGGDTDYDAAFISRLSIS |
| | | | | KDNSKSQVFFKMNSLQANDTGIYYCARYRFYGMDY |
| | | | | WGQGTSVTVSSASTKGPEVQLVESGGGLVQPGGSL |
| | | | | RLSCAASGYTFTNYGMNWVRQAPGKGLEWVGWINT |
| | | | | YTGEPTYAADFKRRFTFSLDTSKSTAYLQMNSLRA |
| | | | | EDTAVYYCAKYPHYYGSSHWYFDVWGQGTLVTVSS |
| 673 | DVD541L | AB074VL | AB014VL | AIQMTQSSSSFSVSLGDRVTITCKASEDIYNRFAW |
| | | | | YQQKPGNAPRLLISGAASLEAGVPSRFSGSGSGQD |
| | | | | YTLSITSLQTEDVATYYCQQYWSTPWTFGGGTKLE |
| | | | | IKRTVAAPDIQMTQSPSSLSASVGDRVTITCSASQ |
| | | | | DISNYLNWYQQKPGKAPKVLIYFTSSLHSGVPSRF |
| | | | | SGSGSGTDFTLTISSLQPEDFATYYCQQYSTVPWT |
| | | | | FGQGTKVEIKR |
| 674 | DVD542H | AB014VH | AB074VH | EVQLVESGGGLVQPGGSLRLSCAASGYTFTNYGMN |
| | | | | WVRQAPGKGLEWVGWINTYTGEPTYAADFKRRFTF |
| | | | | SLDTSKSTAYLQMNSLRAEDTAVYYCAKYPHYYGS |
| | | | | SHWYFDVWGQGTLVTVSSASTKGPQVQLKQSGPGL |
| | | | | VQPSQSLSITCTVSGFSLTTYGIHWVRQSPGKGLE |
| | | | | WLGVMWSGGDTDYDAAFISRLSISKDNSKSQVFFK |
| | | | | MNSLQANDTGIYYCARYRFYGMDYWGQGTSVTVSS |
| 675 | DVD542L | AB014VL | AB074VL | DIQMTQSPSSLSASVGDRVTITCSASQDISNYLNW |
| | | | | YQQKPGKAPKVLIYFTSSLHSGVPSRFSGSGSGTD |
| | | | | FTLTISSLQPEDFATYYCQQYSTVPWTFGQGTKVE |
| | | | | IKRTVAAPAIQMTQSSSSFSVSLGDRVTITCKASE |
| | | | | DIYNRFAWYQQKPGNAPRLLISGAASLEAGVPSRF |
| | | | | SGSGSGQDYTLSITSLQTEDVATYYCQQYWSTPWT |
| | | | | FGGGTKLEIKR |

### Example 2.142

### Generation of VEGF (Seq. 1) and PLGF (Seq. 2) DVD-Igs with Linker Set 2

TABLE 195

| | DVD | Outer | Inner | |
|---|---|---|---|---|
| SEQ | Variable | Variable | Variable | |
| ID | Domain | Domain | Domain | Sequence |
| NO | Name | Name | Name | 12345678901234567890123456789012345 |
| 676 | DVD549H | AB074VH | AB014VH | QVQLKQSGPGLVQPSQSLSITCTVSGFSLTTYGIH |
| | | | | WVRQSPGKGLEWLGVMWSGGDTDYDAAFISRLSIS |
| | | | | KDNSKSQVFFKMNSLQANDTGIYYCARYRFYGMDY |
| | | | | WGQGTSVTVSSASTKGPSVFPLAPEVQLVESGGGL |
| | | | | VQPGGSLRLSCAASGYTFTNYGMNWVRQAPGKGLE |
| | | | | WVGWINTYTGEPTYAADFKRRFTFSLDTSKSTAYL |
| | | | | QMNSLRAEDTAVYYCAKYPHYYGSSHWYFDVWGQG |
| | | | | TLVTVSS |
| 677 | DVD549L | AB074VL | AB014VL | AIQMTQSSSSFSVSLGDRVTITCKASEDIYNRFAW |
| | | | | YQQKPGNAPRLLISGAASLEAGVPSRFSGSGSGQD |
| | | | | YTLSITSLQTEDVATYYCQQYWSTPWTFGGGTKLE |
| | | | | IKRTVAAPSVFIFPPDIQMTQSPSSLSASVGDRVT |
| | | | | ITCSASQDISNYLNWYQQKPGKAPKVLIYFTSSLH |
| | | | | SGVPSRFSGSGSGTDFTLTISSLQPEDFATYYCQQ |
| | | | | YSTVPWTFGQGTKVEIKR |
| 678 | DVD550H | AB014VH | AB074VH | EVQLVESGGGLVQPGGSLRLSCAASGYTFTNYGMN |
| | | | | WVRQAPGKGLEWVGWINTYTGEPTYAADFKRRFTF |
| | | | | SLDTSKSTAYLQMNSLRAEDTAVYYCAKYPHYYGS |
| | | | | SHWYFDVWGQGTLVTVSSASTKGPSVFPLAPQVQL |
| | | | | KQSGPGLVQPSQSLSITCTVSGFSLTTYGIHWVRQ |
| | | | | SPGKGLEWLGVMWSGGDTDYDAAFISRLSISKDNS |
| | | | | KSQVFFKMNSLQANDTGIYYCARYRFYGMDYWGQG |
| | | | | TSVTVSS |
| 679 | DVD550L | AB014VL | AB074VL | DIQMTQSPSSLSASVGDRVTITCSASQDISNYLNW |
| | | | | YQQKPGKAPKVLIYFTSSLHSGVPSRFSGSGSGTD |
| | | | | FTLTISSLQPEDFATYYCQQYSTVPWTFGQGTKVE |
| | | | | IKRTVAAPSVFIFPPAIQMTQSSSSFSVSLGDRVT |
| | | | | ITCKASEDIYNRFAWYQQKPGNAPRLLISGAASLE |
| | | | | AGVPSRFSGSGSGQDYTLSITSLQTEDVATYYCQQ |
| | | | | YWSTPWTFGGGTKLEIKR |

### Example 2.143

### Generation of VEGF (Seq. 1) and PLGF (Seq. 2) DVD-Igs with Linker Set 3

TABLE 196

| | DVD | Outer | Inner | |
|---|---|---|---|---|
| SEQ | Variable | Variable | Variable | |
| ID | Domain | Domain | Domain | Sequence |
| NO | Name | Name | Name | 12345678901234567890123456789012345 |
| 680 | DVD557H | AB074VH | AB014VH | QVQLKQSGPGLVQPSQSLSITCTVSGFSLTTYGIH |
| | | | | WVRQSPGKGLEWLGVMWSGGDTDYDAAFISRLSIS |
| | | | | KDNSKSQVFFKMNSLQANDTGIYYCARYRFYGMDY |
| | | | | WGQGTSVTVSSASTKGPSVFPLAPEVQLVESGGGL |
| | | | | VQPGGSLRLSCAASGYTFTNYGMNWVRQAPGKGLE |
| | | | | WVGWINTYTGEPTYAADFKRRFTFSLDTSKSTAYL |
| | | | | QMNSLRAEDTAVYYCAKYPHYYGSSHWYFDVWGQG |
| | | | | TLVTVSS |
| 681 | DVD557L | AB074VL | AB014VL | AIQMTQSSSSFSVSLGDRVTITCKASEDIYNRFAW |
| | | | | YQQKPGNAPRLLISGAASLEAGVPSRFSGSGSGQD |
| | | | | YTLSITSLQTEDVATYYCQQYWSTPWTFGGGTKLE |
| | | | | IKRTVAAPDIQMTQSPSSLSASVGDRVTITCSASQ |
| | | | | DISNYLNWYQQKPGKAPKVLIYFTSSLHSGVPSRF |
| | | | | SGSGSGTDFTLTISSLQPEDFATYYCQQYSTVPWT |
| | | | | FGQGTKVEIKR |
| 682 | DVD558H | AB014VH | AB074VH | EVQLVESGGGLVQPGGSLRLSCAASGYTFTNYGMN |
| | | | | WVRQAPGKGLEWVGWINTYTGEPTYAADFKRRFTF |
| | | | | SLDTSKSTAYLQMNSLRAEDTAVYYCAKYPHYYGS |
| | | | | SHWYFDVWGQGTLVTVSSASTKGPSVFPLAPQVQL |
| | | | | KQSGPGLVQPSQSLSITCTVSGFSLTTYGIHWVRQ |
| | | | | SPGKGLEWLGVMWSGGDTDYDAAFISRLSISKDNS |
| | | | | KSQVFFKMNSLQANDTGIYYCARYRFYGMDYWGQG |
| | | | | TSVTVSS |
| 683 | DVD558L | AB014VL | AB074VL | DIQMTQSPSSLSASVGDRVTITCSASQDISNYLNW |
| | | | | YQQKPGKAPKVLIYFTSSLHSGVPSRFSGSGSGTD |
| | | | | FTLTISSLQPEDFATYYCQQYSTVPWTFGQGTKVE |
| | | | | IKRTVAAPAIQMTQSSSSFSVSLGDRVTITCKASE |
| | | | | DIYNRFAWYQQKPGNAPRLLISGAASLEAGVPSRF |
| | | | | SGSGSGQDYTLSITSLQTEDVATYYCQQYWSTPWT |
| | | | | FGGGTKLEIKR |

### Example 2.144

### Generation of VEGF (Seq. 1) and PLGF (Seq. 2) DVD-Igs with Linker Set 4

TABLE 197

| | DVD | Outer | Inner | |
|---|---|---|---|---|
| SEQ | Variable | Variable | Variable | |
| ID | Domain | Domain | Domain | Sequence |
| NO | Name | Name | Name | 12345678901234567890123456789012345 |
| 684 | DVD565H | AB074VH | AB014VH | QVQLKQSGPGLVQPSQSLSITCTVSGFSLTTYGIH |
| | | | | WVRQSPGKGLEWLGVMWSGGDTDYDAAFISRLSIS |
| | | | | KDNSKSQVFFKMNSLQANDTGIYYCARYRFYGMDY |
| | | | | WGQGTSVTVSSASTKGPEVQLVESGGGLVQPGGSL |
| | | | | RLSCAASGYTFTNYGMNWVRQAPGKGLEWVGWINT |
| | | | | YTGEPTYAADFKRRFTFSLDTSKSTAYLQMNSLRA |
| | | | | EDTAVYYCAKYPHYYGSSHWYFDVWGQGTLVTVSS |
| 685 | DVD565L | AB074VL | AB014VL | AIQMTQSSSSFSVSLGDRVTITCKASEDIYNRFAW |
| | | | | YQQKPGNAPRLLISGAASLEAGVPSRFSGSGSGQD |
| | | | | YTLSITSLQTEDVATYYCQQYWSTPWTFGGGTKLE |
| | | | | IKRTVAAPSVFIFPPDIQMTQSPSSLSASVGDRVT |
| | | | | ITCSASQDISNYLNWYQQKPGKAPKVLIYFTSSLH |
| | | | | SGVPSRFSGSGSGTDFTLTISSLQPEDFATYYCQQ |
| | | | | YSTVPWTFGQGTKVEIKR |
| 686 | DVD566H | AB014VH | AB074VH | EVQLVESGGGLVQPGGSLRLSCAASGYTFTNYGMN |
| | | | | WVRQAPGKGLEWVGWINTYTGEPTYAADFKRRFTF |
| | | | | SLDTSKSTAYLQMNSLRAEDTAVYYCAKYPHYYGS |
| | | | | SHWYFDVWGQGTLVTVSSASTKGPQVQLKQSGPGL |
| | | | | VQPSQSLSITCTVSGFSLTTYGIHWVRQSPGKGLE |
| | | | | WLGVMWSGGDTDYDAAFISRLSISKDNSKSQVFFK |
| | | | | MNSLQANDTGIYYCARYRFYGMDYWGQGTSVTVSS |
| 687 | DVD566L | AB014VL | AB074VL | DIQMTQSPSSLSASVGDRVTITCSASQDISNYLNW |
| | | | | YQQKPGKAPKVLIYFTSSLHSGVPSRFSGSGSGTD |
| | | | | FTLTISSLQPEDFATYYCQQYSTVPWTFGQGTKVE |
| | | | | IKRTVAAPSVFIFPPAIQMTQSSSSFSVSLGDRVT |
| | | | | ITCKASEDIYNRFAWYQQKPGNAPRLLISGAASLE |
| | | | | AGVPSRFSGSGSGQDYTLSITSLQTEDVATYYCQQ |
| | | | | YWSTPWTFGGGTKLEIKR |

### Example 2.145

### Generation of VEGF (Seq. 2) and PLGF (Seq. 2) DVD-Igs with Linker Set 1

TABLE 198

| | DVD | Outer | Inner | |
|---|---|---|---|---|
| SEQ | Variable | Variable | Variable | |
| ID | Domain | Domain | Domain | Sequence |
| NO | Name | Name | Name | 12345678901234567890123456789012345 |
| 688 | DVD543H | AB074VH | AB070VH | QVQLKQSGPGLVQPSQSLSITCTVSGFSLTTYGIH |
| | | | | WVRQSPGKGLEWLGVMWSGGDTDYDAAFISRLSIS |
| | | | | KDNSKSQVFFKMNSLQANDTGIYYCARYRFYGMDY |
| | | | | WGQGTSVTVSSASTKGPEVQLVESGGGLVQPGGSL |
| | | | | RLSCAASGFTISDYWIHWVRQAPGKGLEWVAGITP |
| | | | | AGGYTYYADSVKGRFTISADTSKNTAYLQMNSLRA |
| | | | | EDTAVYYCARFVFFLPYAMDYWGQGTLVTVSS |
| 689 | DVD543L | AB074VL | AB070VL | AIQMTQSSSSFSVSLGDRVTITCKASEDIYNRFAW |
| | | | | YQQKPGNAPRLLISGAASLEAGVPSRFSGSGSGQD |
| | | | | YTLSITSLQTEDVATYYCQQYWSTPWTFGGGTKLE |
| | | | | IKRTVAAPDIQMTQSPSSLSASVGDRVTITCRASQ |
| | | | | DVSTAVAWYQQKPGKAPKLLIYSASFLYSGVPSRF |
| | | | | SGSGSGTDFTLTISSLQPEDFATYYCQQSYTTPPT |
| | | | | FGQGTKVEIKR |
| 690 | DVD544H | AB070VH | AB074VH | EVQLVESGGGLVQPGGSLRLSCAASGFTISDYWIH |
| | | | | WVRQAPGKGLEWVAGITPAGGYTYYADSVKGRFTI |
| | | | | SADTSKNTAYLQMNSLRAEDTAVYYCARFVFFLPY |
| | | | | AMDYWGQGTLVTVSSASTKGPQVQLKQSGPGLVQP |
| | | | | SQSLSITCTVSGFSLTTYGIHWVRQSPGKGLEWLG |
| | | | | VMWSGGDTDYDAAFISRLSISKDNSKSQVFFKMNS |
| | | | | LQANDTGIYYCARYRFYGMDYWGQGTSVTVSS |
| 691 | DVD544L | AB070VL | AB074VL | DIQMTQSPSSLSASVGDRVTITCRASQDVSTAVAW |
| | | | | YQQKPGKAPKLLIYSASFLYSGVPSRFSGSGSGTD |
| | | | | FTLTISSLQPEDFATYYCQQSYTTPPTFGQGTKVE |
| | | | | IKRTVAAPAIQMTQSSSSFSVSLGDRVTITCKASE |
| | | | | DIYNRFAWYQQKPGNAPRLLISGAASLEAGVPSRF |
| | | | | SGSGSGQDYTLSITSLQTEDVATYYCQQYWSTPWT |
| | | | | FGGGTKLEIKR |

### Example 2.146

### Generation of VEGF (Seq. 2) and PLGF (Seq. 2) DVD-Igs with Linker Set 2

TABLE 199

| | DVD | Outer | Inner | |
|---|---|---|---|---|
| SEQ | Variable | Variable | Variable | |
| ID | Domain | Domain | Domain | Sequence |
| NO | Name | Name | Name | 12345678901234567890123456789012345 |
| 692 | DVD551H | AB074VH | AB070VH | QVQLKQSGPGLVQPSQSLSITCTVSGFSLTTYGIH |
| | | | | WVRQSPGKGLEWLGVMWSGGDTDYDAAFISRLSIS |
| | | | | KDNSKSQVFFKMNSLQANDTGIYYCARYRFYGMDY |
| | | | | WGQGTSVTVSSASTKGPSVFPLAPEVQLVESGGGL |
| | | | | VQPGGSLRLSCAASGFTISDYWIHWVRQAPGKGLE |
| | | | | WVAGITPAGGYTYYADSVKGRFTISADTSKNTAYL |
| | | | | QMNSLRAEDTAVYYCARFVFFLPYAMDYWGQGTLV |
| | | | | TVSS |
| 693 | DVD551L | AB074VL | AB070VL | AIQMTQSSSSFSVSLGDRVTITCKASEDIYNRFAW |
| | | | | YQQKPGNAPRLLISGAASLEAGVPSRFSGSGSGQD |
| | | | | YTLSITSLQTEDVATYYCQQYWSTPWTFGGGTKLE |
| | | | | IKRTVAAPSVFIFPPDIQMTQSPSSLSASVGDRVT |
| | | | | ITCRASQDVSTAVAWYQQKPGKAPKLLIYSASFLY |
| | | | | SGVPSRFSGSGSGTDFTLTISSLQPEDFATYYCQQ |
| | | | | SYTTPPTFGQGTKVEIKR |
| 694 | DVD552H | AB070VH | AB074VH | EVQLVESGGGLVQPGGSLRLSCAASGFTISDYWIH |
| | | | | WVRQAPGKGLEWVAGITPAGGYTYYADSVKGRFTI |
| | | | | SADTSKNTAYLQMNSLRAEDTAVYYCARFVFFLPY |
| | | | | AMDYWGQGTLVTVSSASTKGPSVFPLAPQVQLKQS |
| | | | | GPGLVQPSQSLSITCTVSGFSLTTYGIHWVRQSPG |
| | | | | KGLEWLGVMWSGGDTDYDAAFISRLSISKDNSKSQ |
| | | | | VFFKMNSLQANDTGIYYCARYRFYGMDYWGQGTSV |
| | | | | TVSS |
| 695 | DVD552L | AB070VL | AB074VL | DIQMTQSPSSLSASVGDRVTITCRASQDVSTAVAW |
| | | | | YQQKPGKAPKLLIYSASFLYSGVPSRFSGSGSGTD |
| | | | | FTLTISSLQPEDFATYYCQQSYTTPPTFGQGTKVE |
| | | | | IKRTVAAPSVFIFPPAIQMTQSSSSFSVSLGDRVT |
| | | | | ITCKASEDIYNRFAWYQQKPGNAPRLLISGAASLE |
| | | | | AGVPSRFSGSGSGQDYTLSITSLQTEDVATYYCQQ |
| | | | | YWSTPWTFGGGTKLEIKR |

### Example 2.147

### Generation of VEGF (Seq. 2) and PLGF (Seq. 2) DVD-Igs with Linker Set 3

TABLE 200

| | DVD | Outer | Inner | |
|---|---|---|---|---|
| SEQ | Variable | Variable | Variable | |
| ID | Domain | Domain | Domain | Sequence |
| NO | Name | Name | Name | 12345678901234567890123456789012345 |
| 696 | DVD559H | AB074VH | AB070VH | QVQLKQSGPGLVQPSQSLSITCTVSGFSLTTYGIH |
| | | | | WVRQSPGKGLEWLGVMWSGGDTDYDAAFISRLSIS |
| | | | | KDNSKSQVFFKMNSLQANDTGIYYCARYRFYGMDY |
| | | | | WGQGTSVTVSSASTKGPSVFPLAPEVQLVESGGGL |
| | | | | VQPGGSLRLSCAASGFTISDYWIHWVRQAPGKGLE |
| | | | | WVAGITPAGGYTYYADSVKGRFTISADTSKNTAYL |
| | | | | QMNSLRAEDTAVYYCARFVFFLPYAMDYWGQGTLV |
| | | | | TVSS |
| 697 | DVD559L | AB074VL | AB070VL | AIQMTQSSSSFSVSLGDRVTITCKASEDIYNRFAW |
| | | | | YQQKPGNAPRLLISGAASLEAGVPSRFSGSGSGQD |
| | | | | YTLSITSLQTEDVATYYCQQYWSTPWTFGGGTKLE |
| | | | | IKRTVAAPDIQMTQSPSSLSASVGDRVTITCRASQ |
| | | | | DVSTAVAWYQQKPGKAPKLLIYSASFLYSGVPSRF |
| | | | | SGSGSGTDFTLTISSLQPEDFATYYCQQSYTTPPT |
| | | | | FGQGTKVEIKR |
| 698 | DVD560H | AB070VH | AB074VH | EVQLVESGGGLVQPGGSLRLSCAASGFTISDYWIH |
| | | | | WVRQAPGKGLEWVAGITPAGGYTYYADSVKGRFTI |
| | | | | SADTSKNTAYLQMNSLRAEDTAVYYCARFVFFLPY |
| | | | | AMDYWGQGTLVTVSSASTKGPSVFPLAPQVQLKQS |
| | | | | GPGLVQPSQSLSITCTVSGFSLTTYGIHWVRQSPG |
| | | | | KGLEWLGVMWSGGDTDYDAAFISRLSISKDNSKSQ |
| | | | | VFFKMNSLQANDTGIYYCARYRFYGMDYWGQGTSV |
| | | | | TVSS |
| 699 | DVD560L | AB070VL | AB074VL | DIQMTQSPSSLSASVGDRVTITCRASQDVSTAVAW |
| | | | | YQQKPGKAPKLLIYSASFLYSGVPSRFSGSGSGTD |
| | | | | FTLTISSLQPEDFATYYCQQSYTTPPTFGQGTKVE |
| | | | | IKRTVAAPAIQMTQSSSSFSVSLGDRVTITCKASE |
| | | | | DIYNRFAWYQQKPGNAPRLLISGAASLEAGVPSRF |
| | | | | SGSGSGQDYTLSITSLQTEDVATYYCQQYWSTPWT |
| | | | | FGGGTKLEIKR |

### Example 2.148

### Generation of VEGF (Seq. 2) and PLGF (Seq. 2) DVD-Igs with Linker Set 4

TABLE 201

| | DVD | Outer | Inner | |
|---|---|---|---|---|
| SEQ | Variable | Variable | Variable | |
| ID | Domain | Domain | Domain | Sequence |
| NO | Name | Name | Name | 12345678901234567890123456789012345 |
| 700 | DVD567H | AB074VH | AB070VH | QVQLKQSGPGLVQPSQSLSITCTVSGFSLTTYGIH |
| | | | | WVRQSPGKGLEWLGVMWSGGDTDYDAAFISRLSIS |
| | | | | KDNSKSQVFFKMNSLQANDTGIYYCARYRFYGMDY |
| | | | | WGQGTSVTVSSASTKGPEVQLVESGGGLVQPGGSL |
| | | | | RLSCAASGFTISDYWIHWVRQAPGKGLEWVAGITP |
| | | | | AGGYTYYADSVKGRFTISADTSKNTAYLQMNSLRA |
| | | | | EDTAVYYCARFVFFLPYAMDYWGQGTLVTVSS |
| 701 | DVD567L | AB074VL | AB070VL | AIQMTQSSSSFSVSLGDRVTITCKASEDIYNRFAW |
| | | | | YQQKPGNAPRLLISGAASLEAGVPSRFSGSGSGQD |
| | | | | YTLSITSLQTEDVATYYCQQYWSTPWTFGGGTKLE |
| | | | | IKRTVAAPSVFIFPPDIQMTQSPSSLSASVGDRVT |
| | | | | ITCRASQDVSTAVAWYQQKPGKAPKLLIYSASFLY |
| | | | | SGVPSRFSGSGSGTDFTLTISSLQPEDFATYYCQQ |
| | | | | SYTTPPTFGQGTKVEIKR |
| 702 | DVD568VH | AB070VH | AB074VH | EVQLVESGGGLVQPGGSLRLSCAASGFTISDYWIH |
| | | | | WVRQAPGKGLEWVAGITPAGGYTYYADSVKGRFTI |
| | | | | SADTSKNTAYLQMNSLRAEDTAVYYCARFVFFLPY |
| | | | | AMDYWGQGTLVTVSSASTKGPQVQLKQSGPGLVQP |
| | | | | SQSLSITCTVSGFSLTTYGIHWVRQSPGKGLEWLG |
| | | | | VMWSGGDTDYDAAFISRLSISKDNSKSQVFFKMNS |
| | | | | LQANDTGIYYCARYRFYGMDYWGQGTSVTVSS |
| 703 | DVD568VL | AB070VL | AB074VL | DIQMTQSPSSLSASVGDRVTITCRASQDVSTAVAW |
| | | | | YQQKPGKAPKLLIYSASFLYSGVPSRFSGSGSGTD |
| | | | | FTLTISSLQPEDFATYYCQQSYTTPPTFGQGTKVE |
| | | | | IKRTVAAPSVFIFPPAIQMTQSSSSFSVSLGDRVT |
| | | | | ITCKASEDIYNRFAWYQQKPGNAPRLLISGAASLE |
| | | | | AGVPSRFSGSGSGQDYTLSITSLQTEDVATYYCQQ |
| | | | | YWSTPWTFGGGTKLEIKR |

### Example 2.149

### Generation of VEGF (Seq. 3) and PLGF (Seq. 2) DVD-Igs with Linker Set 1

TABLE 202

| | DVD | Outer | Inner | |
|---|---|---|---|---|
| SEQ | Variable | Variable | Variable | |
| ID | Domain | Domain | Domain | Sequence |
| NO | Name | Name | Name | 12345678901234567890123456789012345 |
| 704 | DVD545H | AB074VH | AB071VH | QVQLKQSGPGLVQPSQSLSITCTVSGFSLTTYGIH |
| | | | | WVRQSPGKGLEWLGVMWSGGDTDYDAAFISRLSIS |
| | | | | KDNSKSQVFFKMNSLQANDTGIYYCARYRFYGMDY |
| | | | | WGQGTSVTVSSASTKGPEVQLVESGGGLVQPGGSL |
| | | | | RLSCAASGFTINASWIHWVRQAPGKGLEWVGAIYP |
| | | | | YSGYTNYADSVKGRFTISADTSKNTAYLQMNSLRA |
| | | | | EDTAVYYCARWGHSTSPWAMDYWGQGTLVTVSS |
| 705 | DVD545L | AB074VL | AB071VL | AIQMTQSSSSFSVSLGDRVTITCKASEDIYNRFAW |
| | | | | YQQKPGNAPRLLISGAASLEAGVPSRFSGSGSGQD |
| | | | | YTLSITSLQTEDVATYYCQQYWSTPWTFGGGTKLE |
| | | | | IKRTVAAPDIQMTQSPSSLSASVGDRVTITCRASQ |
| | | | | VIRRSLAWYQQKPGKAPKLLIYAASNLASGVPSRF |
| | | | | SGSGSGTDFTLTISSLQPEDFATYYCQQSNTSPLT |
| | | | | FGQGTKVEIKR |
| 706 | DVD546H | AB071VH | AB074VH | EVQLVESGGGLVQPGGSLRLSCAASGFTINASWIH |
| | | | | WVRQAPGKGLEWVGAIYPYSGYTNYADSVKGRFTI |
| | | | | SADTSKNTAYLQMNSLRAEDTAVYYCARWGHSTSP |
| | | | | WAMDYWGQGTLVTVSSASTKGPQVQLKQSGPGLVQ |
| | | | | PSQSLSITCTVSGFSLTTYGIHWVRQSPGKGLEWL |
| | | | | GVMWSGGDTDYDAAFISRLSISKDNSKSQVFFKMN |
| | | | | SLQANDTGIYYCARYRFYGMDYWGQGTSVTVSS |
| 707 | DVD546L | AB071VL | AB074VL | DIQMTQSPSSLSASVGDRVTITCRASQVIRRSLAW |
| | | | | YQQKPGKAPKLLIYAASNLASGVPSRFSGSGSGTD |
| | | | | FTLTISSLQPEDFATYYCQQSNTSPLTFGQGTKVE |
| | | | | IKRTVAAPAIQMTQSSSSFSVSLGDRVTITCKASE |
| | | | | DIYNRFAWYQQKPGNAPRLLISGAASLEAGVPSRF |
| | | | | SGSGSGQDYTLSITSLQTEDVATYYCQQYWSTPWT |
| | | | | FGGGTKLEIKR |

### Example 2.150

### Generation of VEGF (Seq. 3) and PLGF (Seq. 2) DVD-Igs with Linker Set 2

TABLE 203

| | DVD | Outer | Inner | |
|---|---|---|---|---|
| SEQ | Variable | Variable | Variable | |
| ID | Domain | Domain | Domain | Sequence |
| NO | Name | Name | Name | 12345678901234567890123456789012345 |
| 708 | DVD553H | AB074VH | AB071VH | QVQLKQSGPGLVQPSQSLSITCTVSGFSLTTYGIH |
| | | | | WVRQSPGKGLEWLGVMWSGGDTDYDAAFISRLSIS |
| | | | | KDNSKSQVFFKMNSLQANDTGIYYCARYRFYGMDY |
| | | | | WGQGTSVTVSSASTKGPSVFPLAPEVQLVESGGGL |
| | | | | VQPGGSLRLSCAASGFTINASWIHWVRQAPGKGLE |
| | | | | WVGAIYPYSGYTNYADSVKGRFTISADTSKNTAYL |
| | | | | QMNSLRAEDTAVYYCARWGHSTSPWAMDYWGQGTL |
| | | | | VTVSS |
| 709 | DVD553L | AB074VL | AB071VL | AIQMTQSSSSFSVSLGDRVTITCKASEDIYNRFAW |
| | | | | YQQKPGNAPRLLISGAASLEAGVPSRFSGSGSGQD |
| | | | | YTLSITSLQTEDVATYYCQQYWSTPWTFGGGTKLE |
| | | | | IKRTVAAPSVFIFPPDIQMTQSPSSLSASVGDRVT |
| | | | | ITCRASQVIRRSLAWYQQKPGKAPKLLIYAASNLA |
| | | | | SGVPSRFSGSGSGTDFTLTISSLQPEDFATYYCQQ |
| | | | | SNTSPLTFGQGTKVEIKR |
| 710 | DVD554H | AB071VH | AB074VH | EVQLVESGGGLVQPGGSLRLSCAASGFTINASWIH |
| | | | | WVRQAPGKGLEWVGAIYPYSGYTNYADSVKGRFTI |
| | | | | SADTSKNTAYLQMNSLRAEDTAVYYCARWGHSTSP |
| | | | | WAMDYWGQGTLVTVSSASTKGPSVFPLAPQVQLKQ |
| | | | | SGPGLVQPSQSLSITCTVSGFSLTTYGIHWVRQSP |
| | | | | GKGLEWLGVMWSGGDTDYDAAFISRLSISKDNSKS |
| | | | | QVFFKMNSLQANDTGIYYCARYRFYGMDYWGQGTS |
| | | | | VTVSS |
| 711 | DVD554L | AB071VL | AB074VL | DIQMTQSPSSLSASVGDRVTITCRASQVIRRSLAW |
| | | | | YQQKPGKAPKLLIYAASNLASGVPSRFSGSGSGTD |
| | | | | FTLTISSLQPEDFATYYCQQSNTSPLTFGQGTKVE |
| | | | | IKRTVAAPSVFIFPPAIQMTQSSSSFSVSLGDRVT |
| | | | | ITCKASEDIYNRFAWYQQKPGNAPRLLISGAASLE |
| | | | | AGVPSRFSGSGSGQDYTLSITSLQTEDVATYYCQQ |
| | | | | YWSTPWTFGGGTKLEIKR |

### Example 2.151

### Generation of VEGF (Seq. 3) and PLGF (Seq. 2) DVD-Igs with Linker Set 3

TABLE 204

| | DVD | Outer | Inner | |
|---|---|---|---|---|
| SEQ | Variable | Variable | Variable | |
| ID | Domain | Domain | Domain | Sequence |
| NO | Name | Name | Name | 12345678901234567890123456789012345 |
| 712 | DVD561H | AB074VH | AB071VH | QVQLKQSGPGLVQPSQSLSITCTVSGFSLTTYGIH |
| | | | | WVRQSPGKGLEWLGVMWSGGDTDYDAAFISRLSIS |
| | | | | KDNSKSQVFFKMNSLQANDTGIYYCARYRFYGMDY |
| | | | | WGQGTSVTVSSASTKGPSVFPLAPEVQLVESGGGL |
| | | | | VQPGGSLRLSCAASGFTINASWIHWVRQAPGKGLE |
| | | | | WVGAIYPYSGYTNYADSVKGRFTISADTSKNTAYL |
| | | | | QMNSLRAEDTAVYYCARWGHSTSPWAMDYWGQGTL |
| | | | | VTVSS |
| 713 | DVD561L | AB074VL | AB071VL | AIQMTQSSSSFSVSLGDRVTITCKASEDIYNRFAW |
| | | | | YQQKPGNAPRLLISGAASLEAGVPSRFSGSGSGQD |
| | | | | YTLSITSLQTEDVATYYCQQYWSTPWTFGGGTKLE |
| | | | | IKRTVAAPDIQMTQSPSSLSASVGDRVTITCRASQ |
| | | | | VIRRSLAWYQQKPGKAPKLLIYAASNLASGVPSRF |
| | | | | SGSGSGTDFTLTISSLQPEDFATYYCQQSNTSPLT |
| | | | | FGQGTKVEIKR |
| 714 | DVD562H | AB071VH | AB074VH | EVQLVESGGGLVQPGGSLRLSCAASGFTINASWIH |
| | | | | WVRQAPGKGLEWVGAIYPYSGYTNYADSVKGRFTI |
| | | | | SADTSKNTAYLQMNSLRAEDTAVYYCARWGHSTSP |
| | | | | WAMDYWGQGTLVTVSSASTKGPSVFPLAPQVQLKQ |
| | | | | SGPGLVQPSQSLSITCTVSGFSLTTYGIHWVRQSP |
| | | | | GKGLEWLGVMWSGGDTDYDAAFISRLSISKDNSKS |
| | | | | QVFFKMNSLQANDTGIYYCARYRFYGMDYWGQGTS |
| | | | | VTVSS |
| 715 | DVD562L | AB071VL | AB074VL | DIQMTQSPSSLSASVGDRVTITCRASQVIRRSLAW |
| | | | | YQQKPGKAPKLLIYAASNLASGVPSRFSGSGSGTD |
| | | | | FTLTISSLQPEDFATYYCQQSNTSPLTFGQGTKVE |
| | | | | IKRTVAAPAIQMTQSSSSFSVSLGDRVTITCKASE |
| | | | | DIYNRFAWYQQKPGNAPRLLISGAASLEAGVPSRF |
| | | | | SGSGSGQDYTLSITSLQTEDVATYYCQQYWSTPWT |
| | | | | FGGGTKLEIKR |

### Example 2.152

### Generation of VEGF (Seq. 3) and PLGF (Seq. 2) DVD-Igs with Linker Set 4

TABLE 205

| | DVD | Outer | Inner | |
|---|---|---|---|---|
| SEQ | Variable | Variable | Variable | |
| ID | Domain | Domain | Domain | Sequence |
| NO | Name | Name | Name | 12345678901234567890123456789012345 |
| 716 | DVD569H | AB074VH | AB071VH | QVQLKQSGPGLVQPSQSLSITCTVSGFSLTTYGIH |
| | | | | WVRQSPGKGLEWLGVMWSGGDTDYDAAFISRLSIS |
| | | | | KDNSKSQVFFKMNSLQANDTGIYYCARYRFYGMDY |
| | | | | WGQGTSVTVSSASTKGPEVQLVESGGGLVQPGGSL |
| | | | | RLSCAASGFTINASWIHWVRQAPGKGLEWVGAIYP |
| | | | | YSGYTNYADSVKGRFTISADTSKNTAYLQMNSLRA |
| | | | | EDTAVYYCARWGHSTSPWAMDYWGQGTLVTVSS |
| 717 | DVD569L | AB074VL | AB071VL | AIQMTQSSSSFSVSLGDRVTITCKASEDIYNRFAW |
| | | | | YQQKPGNAPRLLISGAASLEAGVPSRFSGSGSGQD |
| | | | | YTLSITSLQTEDVATYYCQQYWSTPWTFGGGTKLE |
| | | | | IKRTVAAPSVFIFPPDIQMTQSPSSLSASVGDRVT |
| | | | | ITCRASQVIRRSLAWYQQKPGKAPKLLIYAASNLA |
| | | | | SGVPSRFSGSGSGTDFTLTISSLQPEDFATYYCQQ |
| | | | | SNTSPLTFGQGTKVEIKR |
| 718 | DVD570H | AB071VH | AB074VH | EVQLVESGGGLVQPGGSLRLSCAASGFTINASWIH |
| | | | | WVRQAPGKGLEWVGAIYPYSGYTNYADSVKGRFTI |
| | | | | SADTSKNTAYLQMNSLRAEDTAVYYCARWGHSTSP |
| | | | | WAMDYWGQGTLVTVSSASTKGPQVQLKQSGPGLVQ |
| | | | | PSQSLSITCTVSGFSLTTYGIHWVRQSPGKGLEWL |
| | | | | GVMWSGGDTDYDAAFISRLSISKDNSKSQVFFKMN |
| | | | | SLQANDTGIYYCARYRFYGMDYWGQGTSVTVSS |
| 719 | DVD570L | AB071VL | AB074VL | DIQMTQSPSSLSASVGDRVTITCRASQVIRRSLAW |
| | | | | YQQKPGKAPKLLIYAASNLASGVPSRFSGSGSGTD |
| | | | | FTLTISSLQPEDFATYYCQQSNTSPLTFGQGTKVE |
| | | | | IKRTVAAPSVFIFPPAIQMTQSSSSFSVSLGDRVT |
| | | | | ITCKASEDIYNRFAWYQQKPGNAPRLLISGAASLE |
| | | | | AGVPSRFSGSGSGQDYTLSITSLQTEDVATYYCQQ |
| | | | | YWSTPWTFGGGTKLEIKR |

### Example 2.153

### Generation of HER2 (Seq. 1) and PLGF (Seq. 2) DVD-Igs with Linker Set 1

TABLE 206

| | DVD | Outer | Inner | |
|---|---|---|---|---|
| SEQ | Variable | Variable | Variable | |
| ID | Domain | Domain | Domain | Sequence |
| NO | Name | Name | Name | 12345678901234567890123456789012345 |
| 720 | DVD547H | AB074VH | AB004VH | QVQLKQSGPGLVQPSQSLSITCTVSGFSLTTYGIH |
| | | | | WVRQSPGKGLEWLGVMWSGGDTDYDAAFISRLSIS |
| | | | | KDNSKSQVFFKMNSLQANDTGIYYCARYRFYGMDY |
| | | | | WGQGTSVTVSSASTKGPEVQLVESGGGLVQPGGSL |
| | | | | RLSCAASGFNIKDTYIHWVRQAPGKGLEWVARIYP |
| | | | | TNGYTRYADSVKGRFTISADTSKNTAYLQMNSLRA |
| | | | | EDTAVYYCSRWGGDGFYAMDYWGQGTLVTVSS |
| 721 | DVD547L | AB074VL | AB004VL | AIQMTQSSSSFSVSLGDRVTITCKASEDIYNRFAW |
| | | | | YQQKPGNAPRLLISGAASLEAGVPSRFSGSGSGQD |
| | | | | YTLSITSLQTEDVATYYCQQYWSTPWTFGGGTKLE |
| | | | | IKRTVAAPDIQMTQSPSSLSASVGDRVTITCRASQ |
| | | | | DVNTAVAWYQQKPGKAPKLLIYSASFLYSGVPSRF |
| | | | | SGSRSGTDFTLTISSLQPEDFATYYCQQHYTTPPT |
| | | | | FGQGTKVEIKR |
| 722 | DVD548H | AB004VH | AB074VH | EVQLVESGGGLVQPGGSLRLSCAASGFNIKDTYIH |
| | | | | WVRQAPGKGLEWVARIYPTNGYTRYADSVKGRFTI |
| | | | | SADTSKNTAYLQMNSLRAEDTAVYYCSRWGGDGFY |
| | | | | AMDYWGQGTLVTVSSASTKGPQVQLKQSGPGLVQP |
| | | | | SQSLSITCTVSGFSLTTYGIHWVRQSPGKGLEWLG |
| | | | | VMWSGGDTDYDAAFISRLSISKDNSKSQVFFKMNS |
| | | | | LQANDTGIYYCARYRFYGMDYWGQGTSVTVSS |
| 723 | DVD548L | AB004VL | AB074VL | DIQMTQSPSSLSASVGDRVTITCRASQDVNTAVAW |
| | | | | YQQKPGKAPKLLIYSASFLYSGVPSRFSGSRSGTD |
| | | | | FTLTISSLQPEDFATYYCQQHYTTPPTFGQGTKVE |
| | | | | IKRTVAAPAIQMTQSSSSFSVSLGDRVTITCKASE |
| | | | | DIYNRFAWYQQKPGNAPRLLISGAASLEAGVPSRF |
| | | | | SGSGSGQDYTLSITSLQTEDVATYYCQQYWSTPWT |
| | | | | FGGGTKLEIKR |

### Example 2.154

### Generation of HER2 (Seq. 1) and PLGF (Seq. 2) DVD-Igs with Linker Set 2

TABLE 207

| | DVD | Outer | Inner | |
|---|---|---|---|---|
| SEQ | Variable | Variable | Variable | |
| ID | Domain | Domain | Domain | Sequence |
| NO | Name | Name | Name | 12345678901234567890123456789012345 |
| 724 | DVD555H | AB074VH | AB004VH | QVQLKQSGPGLVQPSQSLSITCTVSGFSLTTYGIH |
| | | | | WVRQSPGKGLEWLGVMWSGGDTDYDAAFISRLSIS |
| | | | | KDNSKSQVFFKMNSLQANDTGIYYCARYRFYGMDY |
| | | | | WGQGTSVTVSSASTKGPSVFPLAPEVQLVESGGGL |
| | | | | VQPGGSLRLSCAASGFNIKDTYIHWVRQAPGKGLE |
| | | | | WVARIYPTNGYTRYADSVKGRFTISADTSKNTAYL |
| | | | | QMNSLRAEDTAVYYCSRWGGDGFYAMDYWGQGTLV |
| | | | | TVSS |
| 725 | DVD555L | AB074VL | AB004VL | AIQMTQSSSSFSVSLGDRVTITCKASEDIYNRFAW |
| | | | | YQQKPGNAPRLLISGAASLEAGVPSRFSGSGSGQD |
| | | | | YTLSITSLQTEDVATYYCQQYWSTPWTFGGGTKLE |
| | | | | IKRTVAAPSVFIFPPDIQMTQSPSSLSASVGDRVT |
| | | | | ITCRASQDVNTAVAWYQQKPGKAPKLLIYSASFLY |
| | | | | SGVPSRFSGSRSGTDFTLTISSLQPEDFATYYCQQ |
| | | | | HYTTPPTFGQGTKVEIKR |
| 726 | DVD556H | AB004VH | AB074VH | EVQLVESGGGLVQPGGSLRLSCAASGFNIKDTYIH |
| | | | | WVRQAPGKGLEWVARIYPTNGYTRYADSVKGRFTI |
| | | | | SADTSKNTAYLQMNSLRAEDTAVYYCSRWGGDGFY |
| | | | | AMDYWGQGTLVTVSSASTKGPSVFPLAPQVQLKQS |
| | | | | GPGLVQPSQSLSITCTVSGFSLTTYGIHWVRQSPG |
| | | | | KGLEWLGVMWSGGDTDYDAAFISRLSISKDNSKSQ |
| | | | | VFFKMNSLQANDTGIYYCARYRFYGMDYWGQGTSV |
| | | | | TVSS |
| 727 | DVD556L | AB004VL | AB074VL | DIQMTQSPSSLSASVGDRVTITCRASQDVNTAVAW |
| | | | | YQQKPGKAPKLLIYSASFLYSGVPSRFSGSRSGTD |
| | | | | FTLTISSLQPEDFATYYCQQHYTTPPTFGQGTKVE |
| | | | | IKRTVAAPSVFIFPPAIQMTQSSSSFSVSLGDRVT |
| | | | | ITCKASEDIYNRFAWYQQKPGNAPRLLISGAASLE |
| | | | | AGVPSRFSGSGSGQDYTLSITSLQTEDVATYYCQQ |
| | | | | YWSTPWTFGGGTKLEIKR |

### Example 2.155

### Generation of HER2 (Seq. 1) and PLGF (Seq. 2) DVD-Igs with Linker Set 3

TABLE 208

| | DVD | Outer | Inner | |
|---|---|---|---|---|
| SEQ | Variable | Variable | Variable | |
| ID | Domain | Domain | Domain | Sequence |
| NO | Name | Name | Name | 12345678901234567890123456789012345 |
| 728 | DVD563H | AB074VH | AB004VH | QVQLKQSGPGLVQPSQSLSITCTVSGFSLTTYGIH |
| | | | | WVRQSPGKGLEWLGVMWSGGDTDYDAAFISRLSIS |
| | | | | KDNSKSQVFFKMNSLQANDTGIYYCARYRFYGMDY |
| | | | | WGQGTSVTVSSASTKGPSVFPLAPEVQLVESGGGL |
| | | | | VQPGGSLRLSCAASGFNIKDTYIHWVRQAPGKGLE |
| | | | | WVARIYPTNGYTRYADSVKGRFTISADTSKNTAYL |
| | | | | QMNSLRAEDTAVYYCSRWGGDGFYAMDYWGQGTLV |
| | | | | TVSS |
| 729 | DVD563L | AB074VL | AB004VL | AIQMTQSSSSFSVSLGDRVTITCKASEDIYNRFAW |
| | | | | YQQKPGNAPRLLISGAASLEAGVPSRFSGSGSGQD |
| | | | | YTLSITSLQTEDVATYYCQQYWSTPWTFGGGTKLE |
| | | | | IKRTVAAPDIQMTQSPSSLSASVGDRVTITCRASQ |
| | | | | DVNTAVAWYQQKPGKAPKLLIYSASFLYSGVPSRF |
| | | | | SGSRSGTDFTLTISSLQPEDFATYYCQQHYTTPPT |
| | | | | FGQGTKVEIKR |
| 730 | DVD564H | AB004VH | AB074VH | EVQLVESGGGLVQPGGSLRLSCAASGFNIKDTYIH |
| | | | | WVRQAPGKGLEWVARIYPTNGYTRYADSVKGRFTI |
| | | | | SADTSKNTAYLQMNSLRAEDTAVYYCSRWGGDGFY |
| | | | | AMDYWGQGTLVTVSSASTKGPSVFPLAPQVQLKQS |
| | | | | GPGLVQPSQSLSITCTVSGFSLTTYGIHWVRQSPG |
| | | | | KGLEWLGVMWSGGDTDYDAAFISRLSISKDNSKSQ |
| | | | | VFFKMNSLQANDTGIYYCARYRFYGMDYWGQGTSV |
| | | | | TVSS |
| 731 | DVD564L | AB004VL | AB074VL | DIQMTQSPSSLSASVGDRVTITCRASQDVNTAVAW |
| | | | | YQQKPGKAPKLLIYSASFLYSGVPSRFSGSRSGTD |
| | | | | FTLTISSLQPEDFATYYCQQHYTTPPTFGQGTKVE |
| | | | | IKRTVAAPAIQMTQSSSSFSVSLGDRVTITCKASE |
| | | | | DIYNRFAWYQQKPGNAPRLLISGAASLEAGVPSRF |
| | | | | SGSGSGQDYTLSITSLQTEDVATYYCQQYWSTPWT |
| | | | | FGGGTKLEIKR |

### Example 2.156

### Generation of HER2 (Seq. 1) and PLGF (Seq. 2) DVD-Igs with Linker Set 4

TABLE 209

| | DVD | Outer | Inner | |
|---|---|---|---|---|
| SEQ | Variable | Variable | Variable | |
| ID | Domain | Domain | Domain | Sequence |
| NO | Name | Name | Name | 12345678901234567890123456789012345 |
| 732 | DVD571H | AB074VH | AB004VH | QVQLKQSGPGLVQPSQSLSITCTVSGFSLTTYGIH |
| | | | | WVRQSPGKGLEWLGVMWSGGDTDYDAAFISRLSIS |
| | | | | KDNSKSQVFFKMNSLQANDTGIYYCARYRFYGMDY |
| | | | | WGQGTSVTVSSASTKGPEVQLVESGGGLVQPGGSL |
| | | | | RLSCAASGFNIKDTYIHWVRQAPGKGLEWVARIYP |
| | | | | TNGYTRYADSVKGRFTISADTSKNTAYLQMNSLRA |
| | | | | EDTAVYYCSRWGGDGFYAMDYWGQGTLVTVSS |
| 733 | DVD571L | AB074VL | AB004VL | AIQMTQSSSSFSVSLGDRVTITCKASEDIYNRFAW |
| | | | | YQQKPGNAPRLLISGAASLEAGVPSRFSGSGSGQD |
| | | | | YTLSITSLQTEDVATYYCQQYWSTPWTFGGGTKLE |
| | | | | IKRTVAAPSVFIFPPDIQMTQSPSSLSASVGDRVT |
| | | | | ITCRASQDVNTAVAWYQQKPGKAPKLLIYSASFLY |
| | | | | SGVPSRFSGSRSGTDFTLTISSLQPEDFATYYCQQ |
| | | | | HYTTPPTFGQGTKVEIKR |
| 734 | DVD572H | AB004VH | AB074VH | EVQLVESGGGLVQPGGSLRLSCAASGFNIKDTYIH |
| | | | | WVRQAPGKGLEWVARIYPTNGYTRYADSVKGRFTI |
| | | | | SADTSKNTAYLQMNSLRAEDTAVYYCSRWGGDGFY |
| | | | | AMDYWGQGTLVTVSSASTKGPQVQLKQSGPGLVQP |
| | | | | SQSLSITCTVSGFSLTTYGIHWVRQSPGKGLEWLG |
| | | | | VMWSGGDTDYDAAFISRLSISKDNSKSQVFFKMNS |
| | | | | LQANDTGIYYCARYRFYGMDYWGQGTSVTVSS |
| 735 | DVD572L | AB004VL | AB004VL | DIQMTQSPSSLSASVGDRVTITCRASQDVNTAVAW |
| | | | | YQQKPGKAPKLLIYSASFLYSGVPSRFSGSRSGTD |
| | | | | FTLTISSLQPEDFATYYCQQHYTTPPTFGQGTKVE |
| | | | | IKRTVAAPSVFIFPPAIQMTQSSSSFSVSLGDRVT |
| | | | | ITCKASEDIYNRFAWYQQKPGNAPRLLISGAASLE |
| | | | | AGVPSRFSGSGSGQDYTLSITSLQTEDVATYYCQQ |
| | | | | YWSTPWTFGGGTKLEIKR |

### Example 2.157

### Generation of PLGF (Seq. 1) and VEGF (Seq. 2) DVD-Igs with Linker Set 1

TABLE 210

| | DVD | Outer | Inner | |
|---|---|---|---|---|
| SEQ | Variable | Variable | Variable | |
| ID | Domain | Domain | Domain | Sequence |
| NO | Name | Name | Name | 12345678901234567890123456789012345 |
| 736 | DVD573H | AB047VH | AB070VH | QVQLQQSGAELVKPGASVKISCKASGYTFTDYYINWV |
| | | | | KLAPGQGLEWIGWIYPGSGNTKYNEKFKGKATLTIDT |
| | | | | SSSTAYMQLSSLTSEDTAVYFCVRDSPFFDYWGQGTL |
| | | | | LTVSSASTKGPEVQLVESGGGLVQPGGSLRLSCAASG |
| | | | | FTISDYWIHWVRQAPGKGLEWVAGITPAGGYTYYADS |
| | | | | VKGRFTISADTSKNTAYLQMNSLRAEDTAVYYCARFV |
| | | | | FFLPYAMDYWGQGTLVTVSS |
| 737 | DVD573L | AB047VL | AB070VL | DIVLTQSPDSLAVSLGERVTMNCKSSQSLLNSGMRKS |
| | | | | FLAWYQQKPGQSPKLLIYWASTRESGVPDRFTGSGSG |
| | | | | TDFTLTISSVQAEDVAVYYCKQSYHLFTFGSGTKLEI |
| | | | | KRTVAAPDIQMTQSPSSLSASVGDRVTITCRASQDVS |
| | | | | TAVAWYQQKPGKAPKLLIYSASFLYSGVPSRFSGSGS |
| | | | | GTDFTLTISSLQPEDFATYYCQQSYTTPPTFGQGTKV |
| | | | | EIKR |
| 738 | DVD574H | AB070VH | AB047VH | EVQLVESGGGLVQPGGSLRLSCAASGFTISDYWIHWV |
| | | | | RQAPGKGLEWVAGITPAGGYTYYADSVKGRFTISADT |
| | | | | SKNTAYLQMNSLRAEDTAVYYCARFVFFLPYAMDYWG |
| | | | | QGTLVTVSSASTKGPQVQLQQSGAELVKPGASVKISC |
| | | | | KASGYTFTDYYINWVKLAPGQGLEWIGWIYPGSGNTK |
| | | | | YNEKFKGKATLTIDTSSSTAYMQLSSLTSEDTAVYFC |
| | | | | VRDSPFFDYWGQGTLLTVSS |
| 739 | DVD574L | AB070VL | AB047VL | DIQMTQSPSSLSASVGDRVTITCRASQDVSTAVAWYQ |
| | | | | QKPGKAPKLLIYSASFLYSGVPSRFSGSGSGTDFTLT |
| | | | | ISSLQPEDFATYYCQQSYTTPPTFGQGTKVEIKRTVA |
| | | | | APDIVLTQSPDSLAVSLGERVTMNCKSSQSLLNSGMR |
| | | | | KSFLAWYQQKPGQSPKLLIYWASTRESGVPDRFTGSG |
| | | | | SGTDFTLTISSVQAEDVAVYYCKQSYHLFTFGSGTKL |
| | | | | EIKR |

### Example 2.158

### Generation of PLGF (Seq. 1) and VEGF (Seq. 2) DVD-Igs with Linker Set 2

TABLE 211

| | DVD | Outer | Inner | |
|---|---|---|---|---|
| SEQ | Variable | Variable | Variable | |
| ID | Domain | Domain | Domain | Sequence |
| NO | Name | Name | Name | 12345678901234567890123456789012345 |
| 740 | DVD581H | AB047VH | AB070VH | QVQLQQSGAELVKPGASVKISCKASGYTFTDYYIN |
| | | | | WVKLAPGQGLEWIGWIYPGSGNTKYNEKFKGKATL |
| | | | | TIDTSSSTAYMQLSSLTSEDTAVYFCVRDSPFFDY |
| | | | | WGQGTLLTVSSASTKGPSVFPLAPEVQLVESGGGL |
| | | | | VQPGGSLRLSCAASGFTISDYWIHWVRQAPGKGLE |
| | | | | WVAGITPAGGYTYYADSVKGRFTISADTSKNTAYL |
| | | | | QMNSLRAEDTAVYYCARFVFFLPYAMDYWGQGTLV |
| | | | | TVSS |
| 741 | DVD581L | AB047VL | AB070VL | DIVLTQSPDSLAVSLGERVTMNCKSSQSLLNSGMR |
| | | | | KSFLAWYQQKPGQSPKLLIYWASTRESGVPDRFTG |
| | | | | SGSGTDFTLTISSVQAEDVAVYYCKQSYHLFTFGS |
| | | | | GTKLEIKRTVAAPSVFIFPPDIQMTQSPSSLSASV |
| | | | | GDRVTITCRASQDVSTAVAWYQQKPGKAPKLLIYS |
| | | | | ASFLYSGVPSRFSGSGSGTDFTLTISSLQPEDFAT |
| | | | | YYCQQSYTTPPTFGQGTKVEIKR |
| 742 | DVD582H | AB070VH | AB047VH | EVQLVESGGGLVQPGGSLRLSCAASGFTISDYWIH |
| | | | | WVRQAPGKGLEWVAGITPAGGYTYYADSVKGRFTI |
| | | | | SADTSKNTAYLQMNSLRAEDTAVYYCARFVFFLPY |
| | | | | AMDYWGQGTLVTVSSASTKGPSVFPLAPQVQLQQS |
| | | | | GAELVKPGASVKISCKASGYTFTDYYINWVKLAPG |
| | | | | QGLEWIGWIYPGSGNTKYNEKFKGKATLTIDTSSS |
| | | | | TAYMQLSSLTSEDTAVYFCVRDSPFFDYWGQGTLL |
| | | | | TVSS |
| 743 | DVD582L | AB070VL | AB047VL | DIQMTQSPSSLSASVGDRVTITCRASQDVSTAVAW |
| | | | | YQQKPGKAPKLLIYSASFLYSGVPSRFSGSGSGTD |
| | | | | FTLTISSLQPEDFATYYCQQSYTTPPTFGQGTKVE |
| | | | | IKRTVAAPSVFIFPPDIVLTQSPDSLAVSLGERVT |
| | | | | MNCKSSQSLLNSGMRKSFLAWYQQKPGQSPKLLIY |
| | | | | WASTRESGVPDRFTGSGSGTDFTLTISSVQAEDVA |
| | | | | VYYCKQSYHLFTFGSGTKLEIKR |

### Example 2.159

### Generation of PLGF (Seq. 1) and VEGF (Seq. 2) DVD-Igs with Linker Set 3

TABLE 212

| | DVD | Outer | Inner | |
|---|---|---|---|---|
| SEQ | Variable | Variable | Variable | |
| ID | Domain | Domain | Domain | Sequence |
| NO | Name | Name | Name | 12345678901234567890123456789012345 |
| 744 | DVD589VH | AB047VH | AB070VH | QVQLQQSGAELVKPGASVKISCKASGYTFTDYYIN |
| | | | | WVKLAPGQGLEWIGWIYPGSGNTKYNEKFKGKATL |
| | | | | TIDTSSSTAYMQLSSLTSEDTAVYFCVRDSPFFDY |
| | | | | WGQGTLLTVSSASTKGPSVFPLAPEVQLVESGGGL |
| | | | | VQPGGSLRLSCAASGFTISDYWIHWVRQAPGKGLE |
| | | | | WVAGITPAGGYTYYADSVKGRFTISADTSKNTAYL |
| | | | | QMNSLRAEDTAVYYCARFVFFLPYAMDYWGQGTLV |
| | | | | TVSS |
| 745 | DVD589VL | AB047VL | AB070VL | DIVLTQSPDSLAVSLGERVTMNCKSSQSLLNSGMR |
| | | | | KSFLAWYQQKPGQSPKLLIYWASTRESGVPDRFTG |
| | | | | SGSGTDFTLTISSVQAEDVAVYYCKQSYHLFTFGS |
| | | | | GTKLEIKRTVAAPDIQMTQSPSSLSASVGDRVTIT |
| | | | | CRASQDVSTAVAWYQQKPGKAPKLLIYSASFLYSG |
| | | | | VPSRFSGSGSGTDFTLTISSLQPEDFATYYCQQSY |
| | | | | TTPPTFGQGTKVEIKR |
| 746 | DVD590VH | AB070VH | AB047VH | EVQLVESGGGLVQPGGSLRLSCAASGFTISDYWIH |
| | | | | WVRQAPGKGLEWVAGITPAGGYTYYADSVKGRFTI |
| | | | | SADTSKNTAYLQMNSLRAEDTAVYYCARFVFFLPY |
| | | | | AMDYWGQGTLVTVSSASTKGPSVFPLAPQVQLQQS |
| | | | | GAELVKPGASVKISCKASGYTFTDYYINWVKLAPG |
| | | | | QGLEWIGWIYPGSGNTKYNEKFKGKATLTIDTSSS |
| | | | | TAYMQLSSLTSEDTAVYFCVRDSPFFDYWGQGTLL |
| | | | | TVSS |
| 747 | DVD590VL | AB070VL | AB047VL | DIQMTQSPSSLSASVGDRVTITCRASQDVSTAVAW |
| | | | | YQQKPGKAPKLLIYSASFLYSGVPSRFSGSGSGTD |
| | | | | FTLTISSLQPEDFATYYCQQSYTTPPTFGQGTKVE |
| | | | | IKRTVAAPDIVLTQSPDSLAVSLGERVTMNCKSSQ |
| | | | | SLLNSGMRKSFLAWYQQKPGQSPKLLIYWASTRES |
| | | | | GVPDRFTGSGSGTDFTLTISSVQAEDVAVYYCKQS |
| | | | | YHLFTFGSGTKLEIKR |

### Example 2.160

### Generation of PLGF (Seq. 1) and VEGF (Seq. 2) DVD-Igs with Linker Set 4

TABLE 213

| | DVD | Outer | Inner | |
|---|---|---|---|---|
| SEQ | Variable | Variable | Variable | |
| ID | Domain | Domain | Domain | Sequence |
| NO | Name | Name | Name | 12345678901234567890123456789012345 |
| 748 | DVD597VH | AB047VH | AB070VH | QVQLQQSGAELVKPGASVKISCKASGYTFTDYYIN |
| | | | | WVKLAPGQGLEWIGWIYPGSGNTKYNEKFKGKATL |
| | | | | TIDTSSSTAYMQLSSLTSEDTAVYFCVRDSPFFDY |
| | | | | WGQGTLLTVSSASTKGPEVQLVESGGGLVQPGGSL |
| | | | | RLSCAASGFTISDYWIHWVRQAPGKGLEWVAGITP |
| | | | | AGGYTYYADSVKGRFTISADTSKNTAYLQMNSLRA |
| | | | | EDTAVYYCARFVFFLPYAMDYWGQGTLVTVSS |
| 749 | DVD597VL | AB047VL | AB070VL | DIVLTQSPDSLAVSLGERVTMNCKSSQSLLNSGMR |
| | | | | KSFLAWYQQKPGQSPKLLIYWASTRESGVPDRFTG |
| | | | | SGSGTDFTLTISSVQAEDVAVYYCKQSYHLFTFGS |
| | | | | GTKLEIKRTVAAPSVFIFPPDIQMTQSPSSLSASV |
| | | | | GDRVTITCRASQDVSTAVAWYQQKPGKAPKLLIYS |
| | | | | ASFLYSGVPSRFSGSGSGTDFTLTISSLQPEDFAT |
| | | | | YYCQQSYTTPPTFGQGTKVEIKR |
| 750 | DVD598VH | AB070VH | AB047VH | EVQLVESGGGLVQPGGSLRLSCAASGFTISDYWIH |
| | | | | WVRQAPGKGLEWVAGITPAGGYTYYADSVKGRFTI |
| | | | | SADTSKNTAYLQMNSLRAEDTAVYYCARFVFFLPY |
| | | | | AMDYWGQGTLVTVSSASTKGPQVQLQQSGAELVKP |
| | | | | GASVKISCKASGYTFTDYYINWVKLAPGQGLEWIG |
| | | | | WIYPGSGNTKYNEKFKGKATLTIDTSSSTAYMQLS |
| | | | | SLTSEDTAVYFCVRDSPFFDYWGQGTLLTVSS |
| 751 | DVD598VL | AB070VL | AB047VL | DIQMTQSPSSLSASVGDRVTITCRASQDVSTAVAW |
| | | | | YQQKPGKAPKLLIYSASFLYSGVPSRFSGSGSGTD |
| | | | | FTLTISSLQPEDFATYYCQQSYTTPPTFGQGTKVE |
| | | | | IKRTVAAPSVFIFPPDIVLTQSPDSLAVSLGERVT |
| | | | | MNCKSSQSLLNSGMRKSFLAWYQQKPGQSPKLLIY |
| | | | | WASTRESGVPDRFTGSGSGTDFTLTISSVQAEDVA |
| | | | | VYYCKQSYHLFTFGSGTKLEIKR |

### Example 2.161

### Generation of PLGF (Seq. 1) and VEGF (Seq. 3) DVD-Igs with Linker Set 1

TABLE 214

| | DVD | Outer | Inner | |
|---|---|---|---|---|
| SEQ | Variable | Variable | Variable | |
| ID | Domain | Domain | Domain | Sequence |
| NO | Name | Name | Name | 12345678901234567890123456789012345 |
| 752 | DVD575H | AB047VH | AB071VH | QVQLQQSGAELVKPGASVKISCKASGYTFTDYYIN |
| | | | | WVKLAPGQGLEWIGWIYPGSGNTKYNEKFKGKATL |
| | | | | TIDTSSSTAYMQLSSLTSEDTAVYFCVRDSPFFDY |
| | | | | WGQGTLLTVSSASTKGPEVQLVESGGGLVQPGGSL |
| | | | | RLSCAASGFTINASWIHWVRQAPGKGLEWVGAIYP |
| | | | | YSGYTNYADSVKGRFTISADTSKNTAYLQMNSLRA |
| | | | | EDTAVYYCARWGHSTSPWAMDYWGQGTLVTVSS |
| 753 | DVD575L | AB047VL | AB071VL | DIVLTQSPDSLAVSLGERVTMNCKSSQSLLNSGMR |
| | | | | KSFLAWYQQKPGQSPKLLIYWASTRESGVPDRFTG |
| | | | | SGSGTDFTLTISSVQAEDVAVYYCKQSYHLFTFGS |
| | | | | GTKLEIKRTVAAPDIQMTQSPSSLSASVGDRVTIT |
| | | | | CRASQVIRRSLAWYQQKPGKAPKLLIYAASNLASG |
| | | | | VPSRFSGSGSGTDFTLTISSLQPEDFATYYCQQSN |
| | | | | TSPLTFGQGTKVEIKR |
| 754 | DVD576H | AB071VH | AB047VH | EVQLVESGGGLVQPGGSLRLSCAASGFTINASWIH |
| | | | | WVRQAPGKGLEWVGAIYPYSGYTNYADSVKGRFTI |
| | | | | SADTSKNTAYLQMNSLRAEDTAVYYCARWGHSTSP |
| | | | | WAMDYWGQGTLVTVSSASTKGPQVQLQQSGAELVK |
| | | | | PGASVKISCKASGYTFTDYYINWVKLAPGQGLEWI |
| | | | | GWIYPGSGNTKYNEKFKGKATLTIDTSSSTAYMQL |
| | | | | SSLTSEDTAVYFCVRDSPFFDYWGQGTLLTVSS |
| 755 | DVD576L | AB071VL | AB047VL | DIQMTQSPSSLSASVGDRVTITCRASQVIRRSLAW |
| | | | | YQQKPGKAPKLLIYAASNLASGVPSRFSGSGSGTD |
| | | | | FTLTISSLQPEDFATYYCQQSNTSPLTFGQGTKVE |
| | | | | IKRTVAAPDIVLTQSPDSLAVSLGERVTMNCKSSQ |
| | | | | SLLNSGMRKSFLAWYQQKPGQSPKLLIYWASTRES |
| | | | | GVPDRFTGSGSGTDFTLTISSVQAEDVAVYYCKQS |
| | | | | YHLFTFGSGTKLEIKR |

### Example 2.162

### Generation of PLGF (Seq. 1) and VEGF (Seq. 3) DVD-Igs with Linker Set 2

TABLE 215

| | DVD | Outer | Inner | |
|---|---|---|---|---|
| SEQ | Variable | Variable | Variable | |
| ID | Domain | Domain | Domain | Sequence |
| NO | Name | Name | Name | 12345678901234567890123456789012345 |
| 756 | DVD583H | AB047VH | AB071VH | QVQLQQSGAELVKPGASVKISCKASGYTFTDYYIN |
| | | | | WVKLAPGQGLEWIGWIYPGSGNTKYNEKFKGKATL |
| | | | | TIDTSSSTAYMQLSSLTSEDTAVYFCVRDSPFFDY |
| | | | | WGQGTLLTVSSASTKGPSVFPLAPEVQLVESGGGL |
| | | | | VQPGGSLRLSCAASGFTINASWIHWVRQAPGKGLE |
| | | | | WVGAIYPYSGYTNYADSVKGRFTISADTSKNTAYL |
| | | | | QMNSLRAEDTAVYYCARWGHSTSPWAMDYWGQGTL |
| | | | | VTVSS |
| 757 | DVD583L | AB047VL | AB071VL | DIVLTQSPDSLAVSLGERVTMNCKSSQSLLNSGMR |
| | | | | KSFLAWYQQKPGQSPKLLIYWASTRESGVPDRFTG |
| | | | | SGSGTDFTLTISSVQAEDVAVYYCKQSYHLFTFGS |
| | | | | GTKLEIKRTVAAPSVFIFPPDIQMTQSPSSLSASV |
| | | | | GDRVTITCRASQVIRRSLAWYQQKPGKAPKLLIYA |
| | | | | ASNLASGVPSRFSGSGSGTDFTLTISSLQPEDFAT |
| | | | | YYCQQSNTSPLTFGQGTKVEIKR |
| 758 | DVD584H | AB071VH | AB047VH | EVQLVESGGGLVQPGGSLRLSCAASGFTINASWIH |
| | | | | WVRQAPGKGLEWVGAIYPYSGYTNYADSVKGRFTI |
| | | | | SADTSKNTAYLQMNSLRAEDTAVYYCARWGHSTSP |
| | | | | WAMDYWGQGTLVTVSSASTKGPSVFPLAPQVQLQQ |
| | | | | SGAELVKPGASVKISCKASGYTFTDYYINWVKLAP |
| | | | | GQGLEWIGWIYPGSGNTKYNEKFKGKATLTIDTSS |
| | | | | STAYMQLSSLTSEDTAVYFCVRDSPFFDYWGQGTL |
| | | | | LTVSS |
| 759 | DVD584L | AB071VL | AB047VL | DIQMTQSPSSLSASVGDRVTITCRASQVIRRSLAW |
| | | | | YQQKPGKAPKLLIYAASNLASGVPSRFSGSGSGTD |
| | | | | FTLTISSLQPEDFATYYCQQSNTSPLTFGQGTKVE |
| | | | | IKRTVAAPSVFIFPPDIVLTQSPDSLAVSLGERVT |
| | | | | MNCKSSQSLLNSGMRKSFLAWYQQKPGQSPKLLIY |
| | | | | WASTRESGVPDRFTGSGSGTDFTLTISSVQAEDVA |
| | | | | VYYCKQSYHLFTFGSGTKLEIKR |

### Example 2.163

### Generation of PLGF (Seq. 1) and VEGF (Seq. 3) DVD-Igs with Linker Set 3

TABLE 216

| | DVD | Outer | Inner | |
|---|---|---|---|---|
| SEQ | Variable | Variable | Variable | |
| ID | Domain | Domain | Domain | Sequence |
| NO | Name | Name | Name | 12345678901234567890123456789012345 |
| 760 | DVD591VH | AB047VH | AB071VH | QVQLQQSGAELVKPGASVKISCKASGYTFTDYYIN |
| | | | | WVKLAPGQGLEWIGWIYPGSGNTKYNEKFKGKATL |
| | | | | TIDTSSSTAYMQLSSLTSEDTAVYFCVRDSPFFDY |
| | | | | WGQGTLLTVSSASTKGPSVFPLAPEVQLVESGGGL |
| | | | | VQPGGSLRLSCAASGFTINASWIHWVRQAPGKGLE |
| | | | | WVGAIYPYSGYTNYADSVKGRFTISADTSKNTAYL |
| | | | | QMNSLRAEDTAVYYCARWGHSTSPWAMDYWGQGTL |
| | | | | VTVSS |
| 748 | DVD591VL | AB047VL | AB071VL | DIVLTQSPDSLAVSLGERVTMNCKSSQSLLNSGMR |
| | | | | KSFLAWYQQKPGQSPKLLIYWASTRESGVPDRFTG |
| | | | | SGSGTDFTLTISSVQAEDVAVYYCKQSYHLFTFGS |
| | | | | GTKLEIKRTVAAPDIQMTQSPSSLSASVGDRVTIT |
| | | | | CRASQVIRRSLAWYQQKPGKAPKLLIYAASNLASG |
| | | | | VPSRFSGSGSGTDFTLTISSLQPEDFATYYCQQSN |
| | | | | TSPLTFGQGTKVEIKR |
| 762 | DVD592VH | AB071VH | AB047VH | EVQLVESGGGLVQPGGSLRLSCAASGFTINASWIH |
| | | | | WVRQAPGKGLEWVGAIYPYSGYTNYADSVKGRFTI |
| | | | | SADTSKNTAYLQMNSLRAEDTAVYYCARWGHSTSP |
| | | | | WAMDYWGQGTLVTVSSASTKGPSVFPLAPQVQLQQ |
| | | | | SGAELVKPGASVKISCKASGYTFTDYYINWVKLAP |
| | | | | GQGLEWIGWIYPGSGNTKYNEKFKGKATLTIDTSS |
| | | | | STAYMQLSSLTSEDTAVYFCVRDSPFFDYWGQGTL |
| | | | | LTVSS |
| 763 | DVD592VL | AB071VL | AB047VL | DIQMTQSPSSLSASVGDRVTITCRASQVIRRSLAW |
| | | | | YQQKPGKAPKLLIYAASNLASGVPSRFSGSGSGTD |
| | | | | FTLTISSLQPEDFATYYCQQSNTSPLTFGQGTKVE |
| | | | | IKRTVAAPDIVLTQSPDSLAVSLGERVTMNCKSSQ |
| | | | | SLLNSGMRKSFLAWYQQKPGQSPKLLIYWASTRES |
| | | | | GVPDRFTGSGSGTDFTLTISSVQAEDVAVYYCKQS |
| | | | | YHLFTFGSGTKLEIKR |

### Example 2.164

### Generation of PLGF (Seq. 1) and VEGF (Seq. 3) DVD-Igs with Linker Set 4

TABLE 217

| | DVD | Outer | Inner | |
|---|---|---|---|---|
| SEQ | Variable | Variable | Variable | |
| ID | Domain | Domain | Domain | Sequence |
| NO | Name | Name | Name | 12345678901234567890123456789012345 |
| 764 | DVD599VH | AB047VH | AB071VH | QVQLQQSGAELVKPGASVKISCKASGYTFTDYYIN |
| | | | | WVKLAPGQGLEWIGWIYPGSGNTKYNEKFKGKATL |
| | | | | TIDTSSSTAYMQLSSLTSEDTAVYFCVRDSPFFDY |
| | | | | WGQGTLLTVSSASTKGPEVQLVESGGGLVQPGGSL |
| | | | | RLSCAASGFTINASWIHWVRQAPGKGLEWVGAIYP |
| | | | | YSGYTNYADSVKGRFTISADTSKNTAYLQMNSLRA |
| | | | | EDTAVYYCARWGHSTSPWAMDYWGQGTLVTVSS |
| 765 | DVD599VL | AB047VL | AB071VL | DIVLTQSPDSLAVSLGERVTMNCKSSQSLLNSGMR |
| | | | | KSFLAWYQQKPGQSPKLLIYWASTRESGVPDRFTG |
| | | | | SGSGTDFTLTISSVQAEDVAVYYCKQSYHLFTFGS |
| | | | | GTKLEIKRTVAAPSVFIFPPDIQMTQSPSSLSASV |
| | | | | GDRVTITCRASQVIRRSLAWYQQKPGKAPKLLIYA |
| | | | | ASNLASGVPSRFSGSGSGTDFTLTISSLQPEDFAT |
| | | | | YYCQQSNTSPLTFGQGTKVEIKR |
| 766 | DVD600VH | AB071VH | AB047VH | EVQLVESGGGLVQPGGSLRLSCAASGFTINASWIH |
| | | | | WVRQAPGKGLEWVGAIYPYSGYTNYADSVKGRFTI |
| | | | | SADTSKNTAYLQMNSLRAEDTAVYYCARWGHSTSP |
| | | | | WAMDYWGQGTLVTVSSASTKGPQVQLQQSGAELVK |
| | | | | PGASVKISCKASGYTFTDYYINWVKLAPGQGLEWI |
| | | | | GWIYPGSGNTKYNEKFKGKATLTIDTSSSTAYMQL |
| | | | | SSLTSEDTAVYFCVRDSPFFDYWGQGTLLTVSS |
| 767 | DVD600VL | AB071VL | AB047VL | DIQMTQSPSSLSASVGDRVTITCRASQVIRRSLAW |
| | | | | YQQKPGKAPKLLIYAASNLASGVPSRFSGSGSGTD |
| | | | | FTLTISSLQPEDFATYYCQQSNTSPLTFGQGTKVE |
| | | | | IKRTVAAPSVFIFPPDIVLTQSPDSLAVSLGERVT |
| | | | | MNCKSSQSLLNSGMRKSFLAWYQQKPGQSPKLLIY |
| | | | | WASTRESGVPDRFTGSGSGTDFTLTISSVQAEDVA |
| | | | | VYYCKQSYHLFTFGSGTKLEIKR |

### Example 2.165

### Generation of HER2 (Seq. 1) and PLGF (Seq. 1) DVD-Igs with Linker Set 1

TABLE 218

| | DVD | Outer | Inner | |
|---|---|---|---|---|
| SEQ | Variable | Variable | Variable | |
| ID | Domain | Domain | Domain | Sequence |
| NO | Name | Name | Name | 12345678901234567890123456789012345 |
| 768 | DVD577H | AB047VH | AB004VH | QVQLQQSGAELVKPGASVKISCKASGYTFTDYYIN |
| | | | | WVKLAPGQGLEWIGWIYPGSGNTKYNEKFKGKATL |
| | | | | TIDTSSSTAYMQLSSLTSEDTAVYFCVRDSPFFDY |
| | | | | WGQGTLLTVSSASTKGPEVQLVESGGGLVQPGGSL |
| | | | | RLSCAASGFNIKDTYIHWVRQAPGKGLEWVARIYP |
| | | | | TNGYTRYADSVKGRFTISADTSKNTAYLQMNSLRA |
| | | | | EDTAVYYCSRWGGDGFYAMDYWGQGTLVTVSS |
| 769 | DVD577L | AB047VL | AB004VL | DIVLTQSPDSLAVSLGERVTMNCKSSQSLLNSGMR |
| | | | | KSFLAWYQQKPGQSPKLLIYWASTRESGVPDRFTG |
| | | | | SGSGTDFTLTISSVQAEDVAVYYCKQSYHLFTFGS |
| | | | | GTKLEIKRTVAAPDIQMTQSPSSLSASVGDRVTIT |
| | | | | CRASQDVNTAVAWYQQKPGKAPKLLIYSASFLYSG |
| | | | | VPSRFSGSRSGTDFTLTISSLQPEDFATYYCQQHY |
| | | | | TTPPTFGQGTKVEIKR |
| 770 | DVD578H | AB004VH | AB047VH | EVQLVESGGGLVQPGGSLRLSCAASGFNIKDTYIH |
| | | | | WVRQAPGKGLEWVARIYPTNGYTRYADSVKGRFTI |
| | | | | SADTSKNTAYLQMNSLRAEDTAVYYCSRWGGDGFY |
| | | | | AMDYWGQGTLVTVSSASTKGPQVQLQQSGAELVKP |
| | | | | GASVKISCKASGYTFTDYYINWVKLAPGQGLEWIG |
| | | | | WIYPGSGNTKYNEKFKGKATLTIDTSSSTAYMQLS |
| | | | | SLTSEDTAVYFCVRDSPFFDYWGQGTLLTVSS |
| 771 | DVD578L | AB004VL | AB047VL | DIQMTQSPSSLSASVGDRVTITCRASQDVNTAVAW |
| | | | | YQQKPGKAPKLLIYSASFLYSGVPSRFSGSRSGTD |
| | | | | FTLTISSLQPEDFATYYCQQHYTTPPTFGQGTKVE |
| | | | | IKRTVAAPDIVLTQSPDSLAVSLGERVTMNCKSSQ |
| | | | | SLLNSGMRKSFLAWYQQKPGQSPKLLIYWASTRES |
| | | | | GVPDRFTGSGSGTDFTLTISSVQAEDVAVYYCKQS |
| | | | | YHLFTFGSGTKLEIKR |

### Example 2.166

### Generation of HER2 (Seq. 1) and PLGF (Seq. 1) DVD-Igs with Linker Set 2

TABLE 219

| | DVD | Outer | Inner | |
|---|---|---|---|---|
| SEQ | Variable | Variable | Variable | |
| ID | Domain | Domain | Domain | Sequence |
| NO | Name | Name | Name | 12345678901234567890123456789012345 |
| 772 | DVD585H | AB047VH | AB004VH | QVQLQQSGAELVKPGASVKISCKASGYTFTDYYIN |
| | | | | WVKLAPGQGLEWIGWIYPGSGNTKYNEKFKGKATL |
| | | | | TIDTSSSTAYMQLSSLTSEDTAVYFCVRDSPFFDY |
| | | | | WGQGTLLTVSSASTKGPSVFPLAPEVQLVESGGGL |
| | | | | VQPGGSLRLSCAASGFNIKDTYIHWVRQAPGKGLE |
| | | | | WVARIYPTNGYTRYADSVKGRFTISADTSKNTAYL |
| | | | | QMNSLRAEDTAVYYCSRWGGDGFYAMDYWGQGTLV |
| | | | | TVSS |
| 773 | DVD585L | AB047VL | AB004VL | DIVLTQSPDSLAVSLGERVTMNCKSSQSLLNSGMR |
| | | | | KSFLAWYQQKPGQSPKLLIYWASTRESGVPDRFTG |
| | | | | SGSGTDFTLTISSVQAEDVAVYYCKQSYHLFTFGS |
| | | | | GTKLEIKRTVAAPSVFIFPPDIQMTQSPSSLSASV |
| | | | | GDRVTITCRASQDVNTAVAWYQQKPGKAPKLLIYS |
| | | | | ASFLYSGVPSRFSGSRSGTDFTLTISSLQPEDFAT |
| | | | | YYCQQHYTTPPTFGQGTKVEIKR |
| 774 | DVD586H | AB004VH | AB047VH | EVQLVESGGGLVQPGGSLRLSCAASGFNIKDTYIH |
| | | | | WVRQAPGKGLEWVARIYPTNGYTRYADSVKGRFTI |
| | | | | SADTSKNTAYLQMNSLRAEDTAVYYCSRWGGDGFY |
| | | | | AMDYWGQGTLVTVSSASTKGPSVFPLAPQVQLQQS |
| | | | | GAELVKPGASVKISCKASGYTFTDYYINWVKLAPG |
| | | | | QGLEWIGWIYPGSGNTKYNEKFKGKATLTIDTSSS |
| | | | | TAYMQLSSLTSEDTAVYFCVRDSPFFDYWGQGTLL |
| | | | | TVSS |
| 775 | DVD586L | AB004VL | AB047VL | DIQMTQSPSSLSASVGDRVTITCRASQDVNTAVAW |
| | | | | YQQKPGKAPKLLIYSASFLYSGVPSRFSGSRSGTD |
| | | | | FTLTISSLQPEDFATYYCQQHYTTPPTFGQGTKVE |
| | | | | IKRTVAAPSVFIFPPDIVLTQSPDSLAVSLGERVT |
| | | | | MNCKSSQSLLNSGMRKSFLAWYQQKPGQSPKLLIY |
| | | | | WASTRESGVPDRFTGSGSGTDFTLTISSVQAEDVA |
| | | | | VYYCKQSYHLFTFGSGTKLEIKR |

### Example 2.167

### Generation of HER2 (Seq. 1) and PLGF (Seq. 1) DVD-Igs with Linker Set 3

TABLE 220

| | DVD | Outer | Inner | |
|---|---|---|---|---|
| SEQ | Variable | Variable | Variable | |
| ID | Domain | Domain | Domain | Sequence |
| NO | Name | Name | Name | 12345678901234567890123456789012345 |
| 776 | DVD593VH | AB047VH | AB004VH | QVQLQQSGAELVKPGASVKISCKASGYTFTDYYIN |
| | | | | WVKLAPGQGLEWIGWIYPGSGNTKYNEKFKGKATL |
| | | | | TIDTSSSTAYMQLSSLTSEDTAVYFCVRDSPFFDY |
| | | | | WGQGTLLTVSSASTKGPSVFPLAPEVQLVESGGGL |
| | | | | VQPGGSLRLSCAASGFNIKDTYIHWVRQAPGKGLE |
| | | | | WVARIYPTNGYTRYADSVKGRFTISADTSKNTAYL |
| | | | | QMNSLRAEDTAVYYCSRWGGDGFYAMDYWGQGTLV |
| | | | | TVSS |
| 777 | DVD593VL | AB047VL | AB004VL | DIVLTQSPDSLAVSLGERVTMNCKSSQSLLNSGMR |
| | | | | KSFLAWYQQKPGQSPKLLIYWASTRESGVPDRFTG |
| | | | | SGSGTDFTLTISSVQAEDVAVYYCKQSYHLFTFGS |
| | | | | GTKLEIKRTVAAPDIQMTQSPSSLSASVGDRVTIT |
| | | | | CRASQDVNTAVAWYQQKPGKAPKLLIYSASFLYSG |
| | | | | VPSRFSGSRSGTDFTLTISSLQPEDFATYYCQQHY |
| | | | | TTPPTFGQGTKVEIKR |
| 778 | DVD594VH | AB004VH | AB047VH | EVQLVESGGGLVQPGGSLRLSCAASGFNIKDTYIH |
| | | | | WVRQAPGKGLEWVARIYPTNGYTRYADSVKGRFTI |
| | | | | SADTSKNTAYLQMNSLRAEDTAVYYCSRWGGDGFY |
| | | | | AMDYWGQGTLVTVSSASTKGPSVFPLAPQVQLQQS |
| | | | | GAELVKPGASVKISCKASGYTFTDYYINWVKLAPG |
| | | | | QGLEWIGWIYPGSGNTKYNEKFKGKATLTIDTSSS |
| | | | | TAYMQLSSLTSEDTAVYFCVRDSPFFDYWGQGTLL |
| | | | | TVSS |
| 779 | DVD594VL | AB004VL | AB047VL | DIQMTQSPSSLSASVGDRVTITCRASQDVNTAVAW |
| | | | | YQQKPGKAPKLLIYSASFLYSGVPSRFSGSRSGTD |
| | | | | FTLTISSLQPEDFATYYCQQHYTTPPTFGQGTKVE |
| | | | | IKRTVAAPDIVLTQSPDSLAVSLGERVTMNCKSSQ |
| | | | | SLLNSGMRKSFLAWYQQKPGQSPKLLIYWASTRES |
| | | | | GVPDRFTGSGSGTDFTLTISSVQAEDVAVYYCKQS |
| | | | | YHLFTFGSGTKLEIKR |

### Example 2.168

### Generation of HER2 (Seq. 1) and PLGF (Seq. 1) DVD-Igs with Linker Set 4

TABLE 221

| | DVD | Outer | Inner | |
|---|---|---|---|---|
| SEQ | Variable | Variable | Variable | |
| ID | Domain | Domain | Domain | Sequence |
| NO | Name | Name | Name | 12345678901234567890123456789012345 |
| 780 | DVD601VH | AB047VH | AB004VH | QVQLQQSGAELVKPGASVKISCKASGYTFTDYYIN |
| | | | | WVKLAPGQGLEWIGWIYPGSGNTKYNEKFKGKATL |
| | | | | TIDTSSSTAYMQLSSLTSEDTAVYFCVRDSPFFDY |
| | | | | WGQGTLLTVSSASTKGPEVQLVESGGGLVQPGGSL |
| | | | | RLSCAASGFNIKDTYIHWVRQAPGKGLEWVARIYP |
| | | | | TNGYTRYADSVKGRFTISADTSKNTAYLQMNSLRA |
| | | | | EDTAVYYCSRWGGDGFYAMDYWGQGTLVTVSS |
| 781 | DVD601VL | AB047VL | AB004VL | DIVLTQSPDSLAVSLGERVTMNCKSSQSLLNSGMR |
| | | | | KSFLAWYQQKPGQSPKLLIYWASTRESGVPDRFTG |
| | | | | SGSGTDFTLTISSVQAEDVAVYYCKQSYHLFTFGS |
| | | | | GTKLEIKRPTVAAPSVFIFPPDIQMTQSPSSLSASV |
| | | | | GDRVTITCRASQDVNTAVAWYQQKPGKAPKLLIYS |
| | | | | ASFLYSGVPSRFSGSRSGTDFTLTISSLQPEDFAT |
| | | | | YYCQQHYTTPPTFGQGTKVEIKR |
| 782 | DVD602VH | AB004VH | AB047VH | EVQLVESGGGLVQPGGSLRLSCAASGFNIKDTYIH |
| | | | | WVRQAPGKGLEWVARIYPTNGYTRYADSVKGRFTI |
| | | | | SADTSKNTAYLQMNSLRAEDTAVYYCSRWGGDGFY |
| | | | | AMDYWGQGTLVTVSSASTKGPQVQLQQSGAELVKP |
| | | | | GASVKISCKASGYTFTDYYINWVKLAPGQGLEWIG |
| | | | | WIYPGSGNTKYNEKFKGKATLTIDTSSSTAYMQLS |
| | | | | SLTSEDTAVYFCVRDSPFFDYWGQGTLLTVSS |
| 783 | DVD602VL | AB004VL | AB047VL | DIQMTQSPSSLSASVGDRVTITCRASQDVNTAVAW |
| | | | | YQQKPGKAPKLLIYSASFLYSGVPSRFSGSRSGTD |
| | | | | FTLTISSLQPEDFATYYCQQHYTTPPTFGQGTKVE |
| | | | | IKRTVAAPSVFIFPPDIVLTQSPDSLAVSLGERVT |
| | | | | MNCKSSQSLLNSGMRKSFLAWYQQKPGQSPKLLIY |
| | | | | WASTRESGVPDRFTGSGSGTDFTLTISSVQAEDVA |
| | | | | VYYCKQSYHLFTFGSGTKLEIKR |

### Example 2.169

### Generation of HGF (Seq. 1) and VEGF (Seq. 2) DVD-Igs with Linker Set 1

TABLE 222

| | DVD | Outer | Inner | |
|---|---|---|---|---|
| SEQ | Variable | Variable | Variable | |
| ID | Domain | Domain | Domain | Sequence |
| NO | Name | Name | Name | 12345678901234567890123456789012345 |
| 784 | DVD643H | AB012VH | AB070VH | QVQLVESGGGLVKPGGSLRLSCAASGFTFSDYYMS |
| | | | | WIRQAPGKGLEWVSYISSSGSTIYYADSVKGRFTI |
| | | | | SRDNAKNSLYLQMNSLRAEDTAVYYCARDEYNSGW |
| | | | | YVLFDYWGQGTLVTVSSASTKGPSVFPLAPEVQLV |
| | | | | ESGGGLVQPGGSLRLSCAASGFTISDYWIHWVRQA |
| | | | | PGKGLEWVAGITPAGGYTYYADSVKGRFTISADTS |
| | | | | KNTAYLQMNSLRAEDTAVYYCARFVFFLPYAMDYW |
| | | | | GQGTLVTVSS |
| 785 | DVD643L | AB012VL | AB070VL | DIQMTQSPSSVSASVGDRVTITCRASQGISSWLAW |
| | | | | YQQKPGKAPNLLIYEASSLQSGVPSRFGGSGSGTD |
| | | | | FTLTISSLQPEDFATYYCQQANGFPWTFGQGTKVE |
| | | | | IKRTVAAPSVFIFPPDIQMTQSPSSLSASVGDRVT |
| | | | | ITCRASQDVSTAVAWYQQKPGKAPKLLIYSASFLY |
| | | | | SGVPSRFSGSGSGTDFTLTISSLQPEDFATYYCQQ |
| | | | | SYTTPPTFGQGTKVEIKR |
| 786 | DVD644H | AB070VH | AB012VH | EVQLVESGGGLVQPGGSLRLSCAASGFTISDYWIH |
| | | | | WVRQAPGKGLEWVAGITPAGGYTYYADSVKGRFTI |
| | | | | SADTSKNTAYLQMNSLRAEDTAVYYCARFVFFLPY |
| | | | | AMDYWGQGTLVTVSSASTKGPSVFPLAPQVQLVES |
| | | | | GGGLVKPGGSLRLSCAASGFTFSDYYMSWIRQAPG |
| | | | | KGLEWVSYISSSGSTIYYADSVKGRFTISRDNAKN |
| | | | | SLYLQMNSLRAEDTAVYYCARDEYNSGWYVLFDYW |
| | | | | GQGTLVTVSS |
| 787 | DVD644L | AB070VL | AB012VL | DIQMTQSPSSLSASVGDRVTITCRASQDVSTAVAW |
| | | | | YQQKPGKAPKLLIYSASFLYSGVPSRFSGSGSGTD |
| | | | | FTLTISSLQPEDFATYYCQQSYTTPPTFGQGTKVE |
| | | | | IKRTVAAPSVFIFPPDIQMTQSPSSVSASVGDRVT |
| | | | | ITCRASQGISSWLAWYQQKPGKAPNLLIYEASSLQ |
| | | | | SGVPSRFGGSGSGTDFTLTISSLQPEDFATYYCQQ |
| | | | | ANGFPWTFGQGTKVEIKR |

### Example 2.170

### Generation of HGF (Seq. 1) and VEGF (Seq. 2) DVD-Igs with Linker Set 2

TABLE 223

| | DVD | Outer | Inner | |
|---|---|---|---|---|
| SEQ | Variable | Variable | Variable | |
| ID | Domain | Domain | Domain | Sequence |
| NO | Name | Name | Name | 12345678901234567890123456789012345 |
| 788 | DVD649H | AB012VH | AB070VH | QVQLVESGGGLVKPGGSLRLSCAASGFNTFSDYYMS |
| | | | | WIRQAPGKGLEWVSYISSSGSTIYYADSVKGRFTI |
| | | | | SRDNAKNSLYLQMNSLRAEDTAVYYCARDEYNSGW |
| | | | | YVLFDYWGQGTLVTVSSASTKGPSVFPLAPEVQLV |
| | | | | ESGGGLVQPGGSLRLSCAASGFTISDYWIHWVRQA |
| | | | | PGKGLEWVAGITPAGGYTYYADSVKGRFTISADTS |
| | | | | KNTAYLQMNSLRAEDTAVYYCARFVFFLPYAMDYW |
| | | | | GQGTLVTVSS |
| 789 | DVD649L | AB012VL | AB070VL | DIQMTQSPSSVSASVGDRVTITCRASQGISSWLAW |
| | | | | YQQKPGKAPNLLIYEASSLQSGVPSRFGGSGSGTD |
| | | | | FTLTISSLQPEDFATYYCQQANGFPWTFGQGTKVE |
| | | | | IKRTVAAPDIQMTQSPSSLSASVGDRVTITCRASQ |
| | | | | DVSTAVAWYQQKPGKAPKLLIYSASFLYSGVPSRF |
| | | | | SGSGSGTDFTLTISSLQPEDFATYYCQQSYTTPPT |
| | | | | FGQGTKVEIKR |
| 790 | DVD650H | AB070VH | AB012VH | EVQLVESGGGLVQPGGSLRLSCAASGFTISDYWIH |
| | | | | WVRQAPGKGLEWVAGITPAGGYTYYADSVKGRFTI |
| | | | | SADTSKNTAYLQMNSLRAEDTAVYYCARFVFFLPY |
| | | | | AMDYWGQGTLVTVSSASTKGPSVFPLAPQVQLVES |
| | | | | GGGLVKPGGSLRLSCAASGFTFSDYYMSWIRQAPG |
| | | | | KGLEWVSYISSSGSTIYYADSVKGRFTISRDNAKN |
| | | | | SLYLQMNSLRAEDTAVYYCARDEYNSGWYVLFDYW |
| | | | | GQGTLVTVSS |
| 791 | DVD650L | AB070VL | AB012VL | DIQMTQSPSSLSASVGDRVTITCRASQDVSTAVAW |
| | | | | YQQKPGKAPKLLIYSASFLYSGVPSRFSGSGSGTD |
| | | | | FTLTISSLQPEDFATYYCQQSYTTPPTFGQGTKVE |
| | | | | IKRTVAAPDIQMTQSPSSVSASVGDRVTITCRASQ |
| | | | | GISSWLAWYQQKPGKAPNLLIYEASSLQSGVPSRF |
| | | | | GGSGSGTDFTLTISSLQPEDFATYYCQQANGFPWT |
| | | | | FGQGTKVEIKR |

### Example 2.171

### Generation of HGF (Seq. 1) and VEGF (Seq. 2) DVD-Igs with Linker Set 3

TABLE 224

| | DVD | Outer | Inner | |
|---|---|---|---|---|
| SEQ | Variable | Variable | Variable | |
| ID | Domain | Domain | Domain | Sequence |
| NO | Name | Name | Name | 12345678901234567890123456789012345 |
| 792 | DVD655H | AB012VH | AB070VH | QVQLVESGGGLVKPGGSLRLSCAASGFTFSDYYMS |
| | | | | WIRQAPGKGLEWVSYISSSGSTIYYADSVKGRFTI |
| | | | | SRDNAKNSLYLQMNSLRAEDTAVYYCARDEYNSGW |
| | | | | YVLFDYWGQGTLVTVSSASTKGPEVQLVESGGGLV |
| | | | | QPGGSLRLSCAASGFTISDYWIHWVRQAPGKGLEW |
| | | | | VAGITPAGGYTYYADSVKGRFTISADTSKNTAYLQ |
| | | | | MNSLRAEDTAVYYCARFVFFLPYAMDYWGQGTLVT |
| | | | | VSS |
| 793 | DVD655L | AB012VL | AB070VL | DIQMTQSPSSVSASVGDRVTITCRASQGISSWLAW |
| | | | | YQQKPGKAPNLLIYEASSLQSGVPSRFGGSGSGTD |
| | | | | FTLTISSLQPEDFATYYCQQANGFPWTFGQGTKVE |
| | | | | IKRTVAAPSVFIFPPDIQMTQSPSSLSASVGDRVT |
| | | | | ITCRASQDVSTAVAWYQQKPGKAPKLLIYSASFLY |
| | | | | SGVPSRFSGSGSGTDFTLTISSLQPEDFATYYCQQ |
| | | | | SYTTPPTFGQGTKVEIKR |
| 794 | DVD656H | AB070VH | AB012VH | EVQLVESGGGLVQPGGSLRLSCAASGFTISDYWIH |
| | | | | WVRQAPGKGLEWVAGITPAGGYTYYADSVKGRFTI |
| | | | | SADTSKNTAYLQMNSLRAEDTAVYYCARFVFFLPY |
| | | | | AMDYWGQGTLVTVSSASTKGPQVQLVESGGGLVKP |
| | | | | GGSLRLSCAASGFTFSDYYMSWIRQAPGKGLEWVS |
| | | | | YISSSGSTIYYADSVKGRFTISRDNAKNSLYLQMN |
| | | | | SLRAEDTAVYYCARDEYNSGWYVLFDYWGQGTLVT |
| | | | | VSS |
| 795 | DVD656L | AB070VL | AB012VL | DIQMTQSPSSLSASVGDRVTITCRASQDVSTAVAW |
| | | | | YQQKPGKAPKLLIYSASFLYSGVPSRFSGSGSGTD |
| | | | | FTLTISSLQPEDFATYYCQQSYTTPPTFGQGTKVE |
| | | | | IKRTVAAPSVFIFPPDIQMTQSPSSVSASVGDRVT |
| | | | | ITCRASQGISSWLAWYQQKPGKAPNLLIYEASSLQ |
| | | | | SGVPSRFGGSGSGTDFTLTISSLQPEDFATYYCQQ |
| | | | | ANGFPWTFGQGTKVEIKR |

### Example 2.172

### Generation of HGF (Seq. 1) and VEGF (Seq. 2) DVD-Igs with Linker Set 4

TABLE 225

| | DVD | Outer | Inner | |
|---|---|---|---|---|
| SEQ | Variable | Variable | Variable | |
| ID | Domain | Domain | Domain | Sequence |
| NO | Name | Name | Name | 12345678901234567890123456789012345 |
| 796 | DVD709VH | AB012VH | AB070VH | QVQLVESGGGLVKPGGSLRLSCAASGFTFSDYYMS |
| | | | | WIRQAPGKGLEWVSYISSSGSTIYYADSVKGRFTI |
| | | | | SRDNAKNSLYLQMNSLRAEDTAVYYCARDEYNSGW |
| | | | | YVLFDYWGQGTLVTVSSASTKGPEVQLVESGGGLV |
| | | | | QPGGSLRLSCAASGFTISDYWIHWVRQAPGKGLEW |
| | | | | VAGITPAGGYTYYADSVKGRFTISADTSKNTAYLQ |
| | | | | MNSLRAEDTAVYYCARFVFFLPYAMDYWGQGTLVT |
| | | | | VSS |
| 797 | DVD709VL | AB012VL | AB070VL | DIQMTQSPSSVSASVGDRVTITCRASQGISSWLAW |
| | | | | YQQKPGKAPNLLIYEASSLQSGVPSRFGGSGSGTD |
| | | | | FTLTISSLQPEDFATYYCQQANGFPWTFGQGTKVE |
| | | | | IKRTVAAPDIQMTQSPSSLSASVGDRVTITCRASQ |
| | | | | DVSTAVAWYQQKPGKAPKLLIYSASFLYSGVPSRF |
| | | | | SGSGSGTDFTLTISSLQPEDFATYYCQQSYTTPPT |
| | | | | FGQGTKVEIKR |
| 798 | DVD710VH | AB070VH | AB012VH | EVQLVESGGGLVQPGGSLRLSCAASGFTISDYWIH |
| | | | | WVRQAPGKGLEWVAGITPAGGYTYYADSVKGRFTI |
| | | | | SADTSKNTAYLQMNSLRAEDTAVYYCARFVFFLPY |
| | | | | AMDYWGQGTLVTVSSASTKGPQVQLVESGGGLVKP |
| | | | | GGSLRLSCAASGFTFSDYYMSWIRQAPGKGLEWVS |
| | | | | YISSSGSTIYYADSVKGRFTISRDNAKNSLYLQMN |
| | | | | SLRAEDTAVYYCARDEYNSGWYVLFDYWGQGTLVT |
| | | | | VSS |
| 799 | DVD710VL | AB070VL | AB012VL | DIQMTQSPSSLSASVGDRVTITCRASQDVSTAVAW |
| | | | | YQQKPGKAPKLLIYSASFLYSGVPSRFSGSGSGTD |
| | | | | FTLTISSLQPEDFATYYCQQSYTTPPTFGQGTKVE |
| | | | | IKRTVAAPDIQMTQSPSSVSASVGDRVTITCRASQ |
| | | | | GISSWLAWYQQKPGKAPNLLIYEASSLQSGVPSRF |
| | | | | GGSGSGTDFTLTISSLQPEDFATYYCQQANGFPWT |
| | | | | FGQGTKVEIKR |

### Example 2.173

### Generation of HGF (Seq. 1) and VEGF (Seq. 3) DVD-Igs with Linker Set 1

TABLE 226

| | DVD | Outer | Inner | |
|---|---|---|---|---|
| SEQ | Variable | Variable | Variable | |
| ID | Domain | Domain | Domain | Sequence |
| NO | Name | Name | Name | 12345678901234567890123456789012345 |
| 800 | DVD645H | AB012VH | AB071VH | QVQLVESGGGLVKPGGSLRLSCAASGFTFSDYYMS |
| | | | | WIRQAPGKGLEWVSYISSSGSTIYYADSVKGRFTI |
| | | | | SRDNAKNSLYLQMNSLRAEDTAVYYCARDEYNSGW |
| | | | | YVLFDYWGQGTLVTVSSASTKGPSVFPLAPEVQLV |
| | | | | ESGGGLVQPGGSLRLSCAASGFTINASWIHWVRQA |
| | | | | PGKGLEWVGAIYPYSGYTNYADSVKGRFTISADTS |
| | | | | KNTAYLQMNSLRAEDTAVYYCARWGHSTSPWAMDY |
| | | | | WGQGTLVTVSS |
| 801 | DVD645L | AB012VL | AB071VL | DIQMTQSPSSVSASVGDRVTITCRASQGISSWLAW |
| | | | | YQQKPGKAPNLLIYEASSLQSGVPSRFGGSGSGTD |
| | | | | FTLTISSLQPEDFATYYCQQANGFPWTFGQGTKVE |
| | | | | IKRTVAAPSVFIFPPDIQMTQSPSSLSASVGDRVT |
| | | | | ITCRASQVIRRSLAWYQQKPGKAPKLLIYAASNLA |
| | | | | SGVPSRFSGSGSGTDFTLTISSLQPEDFATYYCQQ |
| | | | | SNTSPLTFGQGTKVEIKR |
| 802 | DVD646H | AB071VH | AB012VH | EVQLVESGGGLVQPGGSLRLSCAASGFTINASWIH |
| | | | | WVRQAPGKGLEWVGAIYPYSGYTNYADSVKGRFTI |
| | | | | SADTSKNTAYLQMNSLRAEDTAVYYCARWGHSTSP |
| | | | | WAMDYWGQGTLVTVSSASTKGPSVFPLAPQVQLVE |
| | | | | SGGGLVKPGGSLRLSCAASGFTFSDYYMSWIRQAP |
| | | | | GKGLEWVSYISSSGSTIYYADSVKGRFTISRDNAK |
| | | | | NSLYLQMNSLRAEDTAVYYCARDEYNSGWYVLFDY |
| | | | | WGQGTLVTVSS |
| 803 | DVD646L | AB071VL | AB012VL | DIQMTQSPSSLSASVGDRVTITCRASQVIRRSLAW |
| | | | | YQQKPGKAPKLLIYAASNLASGVPSRFSGSGSGTD |
| | | | | FTLTISSLQPEDFATYYCQQSNTSPLTFGQGTKVE |
| | | | | IKRTVAAPSVFIFPPDIQMTQSPSSVSASVGDRVT |
| | | | | ITCRASQGISSWLAWYQQKPGKAPNLLIYEASSLQ |
| | | | | SGVPSRFGGSGSGTDFTLTISSLQPEDFATYYCQQ |
| | | | | ANGFPWTFGQGTKVEIKR |

### Example 2.174

### Generation of HGF (Seq. 1) and VEGF (Seq. 3) DVD-Igs with Linker Set 2

TABLE 227

| | DVD | Outer | Inner | |
|---|---|---|---|---|
| SEQ | Variable | Variable | Variable | |
| ID | Domain | Domain | Domain | Sequence |
| NO | Name | Name | Name | 12345678901234567890123456789012345 |
| 804 | DVD651H | AB012VH | AB071VH | QVQLVESGGGLVKPGGSLRLSCAASGFTFSDYYMS |
| | | | | WIRQAPGKGLEWVSYISSSGSTIYYADSVKGRFTI |
| | | | | SRDNAKNSLYLQMNSLRAEDTAVYYCARDEYNSGW |
| | | | | YVLFDYWGQGTLVTVSSASTKGPSVFPLAPEVQLV |
| | | | | ESGGGLVQPGGSLRLSCAASGFTINASWIHWVRQA |
| | | | | PGKGLEWVGAIYPYSGYTNYADSVKGRFTISADTS |
| | | | | KNTAYLQMNSLRAEDTAVYYCARWGHSTSPWAMDY |
| | | | | WGQGTLVTVSS |
| 805 | DVD651L | AB012VL | AB071VL | DIQMTQSPSSVSASVGDRVTITCRASQGISSWLAW |
| | | | | YQQKPGKAPNLLIYEASSLQSGVPSRFGGSGSGTD |
| | | | | FTLTISSLQPEDFATYYCQQANGFPWTFGQGTKVE |
| | | | | IKRTVAAPDIQMTQSPSSLSASVGDRVTITCRASQ |
| | | | | VIRRSLAWYQQKPGKAPKLLIYAASNLASGVPSRF |
| | | | | SGSGSGTDFTLTISSLQPEDFATYYCQQSNTSPLT |
| | | | | FGQGTKVEIKR |
| 806 | DVD652H | AB071VH | AB012VH | EVQLVESGGGLVQPGGSLRLSCAASGFTINASWIH |
| | | | | WVRQAPGKGLEWVGAIYPYSGYTNYADSVKGRFTI |
| | | | | SADTSKNTAYLQMNSLRAEDTAVYYCARWGHSTSP |
| | | | | WAMDYWGQGTLVTVSSASTKGPSVFPLAPQVQLVE |
| | | | | SGGGLVKPGGSLRLSCAASGFTFSDYYMSWIRQAP |
| | | | | GKGLEWVSYISSSGSTIYYADSVKGRFTISRDNAK |
| | | | | NSLYLQMNSLRAEDTAVYYCARDEYNSGWYVLFDY |
| | | | | WGQGTLVTVSS |
| 807 | DVD652L | AB071VL | AB012VL | DIQMTQSPSSLSASVGDRVTITCRASQVIRRSLAW |
| | | | | YQQKPGKAPKLLIYAASNLASGVPSRFSGSGSGTD |
| | | | | FTLTISSLQPEDFATYYCQQSNTSPLTFGQGTKVE |
| | | | | IKRTVAAPDIQMTQSPSSVSASVGDRVTITCRASQ |
| | | | | GISSWLAWYQQKPGKAPNLLIYEASSLQSGVPSRF |
| | | | | GGSGSGTDFTLTISSLQPEDFATYYCQQANGFPWT |
| | | | | FGQGTKVEIKR |

### Example 2.175

### Generation of HGF (Seq. 1) and VEGF (Seq. 3) DVD-Igs with Linker Set 3

TABLE 228

| | DVD | Outer | Inner | |
|---|---|---|---|---|
| SEQ | Variable | Variable | Variable | |
| ID | Domain | Domain | Domain | Sequence |
| NO | Name | Name | Name | 12345678901234567890123456789012345 |
| 808 | DVD657H | AB012VH | AB071VH | QVQLVESGGGLVKPGGSLRLSCAASGFTFSDYYMS |
| | | | | WIRQAPGKGLEWVSYISSSGSTIYYADSVKGRFTI |
| | | | | SRDNAKNSLYLQMNSLRAEDTAVYYCARDEYNSGW |
| | | | | YVLFDYWGQGTLVTVSSASTKGPEVQLVESGGGLV |
| | | | | QPGGSLRLSCAASGFTINASWIHWVRQAPGKGLEW |
| | | | | VGAIYPYSGYTNYADSVKGRFTISADTSKNTAYLQ |
| | | | | MNSLRAEDTAVYYCARWGHSTSPWAMDYWGQGTLV |
| | | | | TVSS |
| 809 | DVD657L | AB012VL | AB071VL | DIQMTQSPSSVSASVGDRVTITCRASQGISSWLAW |
| | | | | YQQKPGKAPNLLIYEASSLQSGVPSRFGGSGSGTD |
| | | | | FTLTISSLQPEDFATYYCQQANGFPWTFGQGTKVE |
| | | | | IKRTVAAPSVFIFPPDIQMTQSPSSLSASVGDRVT |
| | | | | ITCRASQVIRRSLAWYQQKPGKAPKLLIYAASNLA |
| | | | | SGVPSRFSGSGSGTDFTLTISSLQPEDFATYYCQQ |
| | | | | SNTSPLTFGQGTKVEIKR |
| 810 | DVD658H | AB071VH | AB012VH | EVQLVESGGGLVQPGGSLRLSCAASGFTINASWIH |
| | | | | WVRQAPGKGLEWVGAIYPYSGYTNYADSVKGRFTI |
| | | | | SADTSKNTAYLQMNSLRAEDTAVYYCARWGHSTSP |
| | | | | WAMDYWGQGTLVTVSSASTKGPQVQLVESGGGLVK |
| | | | | PGGSLRLSCAASGFTFSDYYMSWIRQAPGKGLEWV |
| | | | | SYISSSGSTIYYADSVKGRFTISRDNAKNSLYLQM |
| | | | | NSLRAEDTAVYYCARDEYNSGWYVLFDYWGQGTLV |
| | | | | TVSS |
| 811 | DVD658L | AB071VL | AB012VL | DIQMTQSPSSLSASVGDRVTITCRASQVIRRSLAW |
| | | | | YQQKPGKAPKLLIYAASNLASGVPSRFSGSGSGTD |
| | | | | FTLTISSLQPEDFATYYCQQSNTSPLTFGQGTKVE |
| | | | | IKRTVAAPSVFIFPPDIQMTQSPSSVSASVGDRVT |
| | | | | ITCRASQGISSWLAWYQQKPGKAPNLLIYEASSLQ |
| | | | | SGVPSRFGGSGSGTDFTLTISSLQPEDFATYYCQQ |
| | | | | ANGFPWTFGQGTKVEIKR |

### Example 2.176

### Generation of HGF (Seq. 1) and VEGF (Seq. 3) DVD-Igs with Linker Set 4

TABLE 229

| | DVD | Outer | Inner | |
|---|---|---|---|---|
| SEQ | Variable | Variable | Variable | |
| ID | Domain | Domain | Domain | Sequence |
| NO | Name | Name | Name | 12345678901234567890123456789012345 |
| 812 | DVD711VH | AB012VH | AB071VH | QVQLVESGGGLVKPGGSLRLSCAASGFTFSDYYMS |
| | | | | WIRQAPGKGLEWVSYISSSGSTIYYADSVKGRFTI |
| | | | | SRDNAKNSLYLQMNSLRAEDTAVYYCARDEYNSGW |
| | | | | YVLFDYWGQGTLVTVSSASTKGPEVQLVESGGGLV |
| | | | | QPGGSLRLSCAASGFTINASWIHWVRQAPGKGLEW |
| | | | | VGAIYPYSGYTNYADSVKGRFTISADTSKNTAYLQ |
| | | | | MNSLRAEDTAVYYCARWGHSTSPWAMDYWGQGTLV |
| | | | | TVSS |
| 813 | DVD711VL | AB012VL | AB071VL | DIQMTQSPSSVSASVGDRVTITCRASQGISSWLAW |
| | | | | YQQKPGKAPNLLIYEASSLQSGVPSRFGGSGSGTD |
| | | | | FTLTISSLQPEDFATYYCQQANGFPWTFGQGTKVE |
| | | | | IKRTVAAPDIQMTQSPSSLSASVGDRVTITCRASQ |
| | | | | VIRRSLAWYQQKPGKAPKLLIYAASNLASGVPSRF |
| | | | | SGSGSGTDFTLTISSLQPEDFATYYCQQSNTSPLT |
| | | | | FGQGTKVEIKR |
| 814 | DVD712VH | AB071VH | AB012VH | EVQLVESGGGLVQPGGSLRLSCAASGFTINASWIH |
| | | | | WVRQAPGKGLEWVGAIYPYSGYTNYADSVKGRFTI |
| | | | | SADTSKNTAYLQMNSLRAEDTAVYYCARWGHSTSP |
| | | | | WAMDYWGQGTLVTVSSASTKGPQVQLVESGGGLVK |
| | | | | PGGSLRLSCAASGFTFSDYYMSWIRQAPGKGLEWV |
| | | | | SYISSSGSTIYYADSVKGRFTISRDNAKNSLYLQM |
| | | | | NSLRAEDTAVYYCARDEYNSGWYVLFDYWGQGTLV |
| | | | | TVSS |
| 815 | DVD712VL | AB071VL | AB012VL | DIQMTQSPSSLSASVGDRVTITCRASQVIRRSLAW |
| | | | | YQQKPGKAPKLLIYAASNLASGVPSRFSGSGSGTD |
| | | | | FTLTISSLQPEDFATYYCQQSNTSPLTFGQGTKVE |
| | | | | IKRTVAAPDIQMTQSPSSVSASVGDRVTITCRASQ |
| | | | | GISSWLAWYQQKPGKAPNLLIYEASSLQSGVPSRF |
| | | | | GGSGSGTDFTLTISSLQPEDFATYYCQQANGFPWT |
| | | | | FGQGTKVEIKR |

### Example 2.177

### Generation of HGF (Seq. 2) and VEGF (Seq. 1) DVD-Igs with Linker Set 1

TABLE 230

| | DVD | Outer | Inner | |
|---|---|---|---|---|
| SEQ | Variable | Variable | Variable | |
| ID | Domain | Domain | Domain | Sequence |
| NO | Name | Name | Name | 12345678901234567890123456789012345 |
| 816 | DVD659H | AB079VH | AB014VH | EVQLVQSGAEVKKPGESLKISCKGSGYSFTTYWMH |
| | | | | WVRQMPGKGLEWMGEINPTNGHTNYNPSFQGQVTI |
| | | | | SADKSISTAYLQWSSLKASDTAMYYCARNYVGSIF |
| | | | | DYWGQGTLVTVSSASTKGPEVQLVESGGGLVQPGG |
| | | | | SLRLSCAASGYTFTNYGMNWVRQAPGKGLEWVGWI |
| | | | | NTYTGEPTYAADFKRRFTFSLDTSKSTAYLQMNSL |
| | | | | RAEDTAVYYCAKYPHYYGSSHWYFDVWGQGTLVTV |
| | | | | SS |
| 817 | DVD659L | AB079VL | AB014VL | DIQMTQSPSSLSASVGDRVTITCKASENVVSYVSW |
| | | | | YQQKPGKAPKLLIYGASNRNTGVPSRFSGSGSGTD |
| | | | | FTLTISSLQPEDFATYYCGQSYNYPYTFGQGTKLE |
| | | | | IKRTVAAPDIQMTQSPSSLSASVGDRVTITCSASQ |
| | | | | DISNYLNWYQQKPGKAPKVLIYFTSSLHSGVPSRF |
| | | | | SGSGSGTDFTLTISSLQPEDFATYYCQQYSTVPWT |
| | | | | FGQGTKVEIKR |
| 818 | DVD660H | AB014VH | AB079VH | EVQLVESGGGLVQPGGSLRLSCAASGYTFTNYGMN |
| | | | | WVRQAPGKGLEWVGWINTYTGEPTYAADFKRRFTF |
| | | | | SLDTSKSTAYLQMNSLRAEDTAVYYCAKYPHYYGS |
| | | | | SHWYFDVWGQGTLVTVSSASTKGPEVQLVQSGAEV |
| | | | | KKPGESLKISCKGSGYSFTTYWMHWVRQMPGKGLE |
| | | | | WMGEINPTNGHTNYNPSFQGQVTISADKSISTAYL |
| | | | | QWSSLKASDTAMYYCARNYVGSIFDYWGQGTLVTV |
| | | | | SS |
| 819 | DVD660L | AB014VL | AB079VL | DIQMTQSPSSLSASVGDRVTITCSASQDISNYLNW |
| | | | | YQQKPGKAPKVLIYFTSSLHSGVPSRFSGSGSGTD |
| | | | | FTLTISSLQPEDFATYYCQQYSTVPWTFGQGTKVE |
| | | | | IKRTVAAPDIQMTQSPSSLSASVGDRVTITCKASE |
| | | | | NVVSYVSWYQQKPGKAPKLLIYGASNRNTGVPSRF |
| | | | | SGSGSGTDFTLTISSLQPEDFATYYCGQSYNYPYT |
| | | | | FGQGTKLEIKR |

### Example 2.178

### Generation of HGF (Seq. 2) and VEGF (Seq. 1) DVD-Igs with Linker Set 2

TABLE 231

| | DVD | Outer | Inner | |
|---|---|---|---|---|
| SEQ | Variable | Variable | Variable | |
| ID | Domain | Domain | Domain | Sequence |
| NO | Name | Name | Name | 12345678901234567890123456789012345 |
| 820 | DVD665H | AB079VH | AB014VH | EVQLVQSGAEVKKPGESLKISCKGSGYSFTTYWMH |
| | | | | WVRQMPGKGLEWMGEINPTNGHTNYNPSFQGQVTI |
| | | | | SADKSISTAYLQWSSLKASDTAMYYCARNYVGSIF |
| | | | | DYWGQGTLVTVSSASTKGPSVFPLAPEVQLVESGG |
| | | | | GLVQPGGSLRLSCAASGYTFTNYGMNWVRQAPGKG |
| | | | | LEWVGWINTYTGEPTYAADFKRRFTFSLDTSKSTA |
| | | | | YLQMNSLRAEDTAVYYCAKYPHYYGSSHWYFDVWG |
| | | | | QGTLVTVSS |
| 821 | DVD665L | AB079VL | AB014VL | DIQMTQSPSSLSASVGDRVTITCKASENVVSYVSW |
| | | | | YQQKPGKAPKLLIYGASNRNTGVPSRFSGSGSGTD |
| | | | | FTLTISSLQPEDFATYYCGQSYNYPYTFGQGTKLE |
| | | | | IKRTVAAPSVFIFPPDIQMTQSPSSLSASVGDRVT |
| | | | | ITCSASQDISNYLNWYQQKPGKAPKVLIYFTSSLH |
| | | | | SGVPSRFSGSGSGTDFTLTISSLQPEDFATYYCQQ |
| | | | | YSTVPWTFGQGTKVEIKR |
| 822 | DVD666H | AB014VH | AB079VH | EVQLVESGGGLVQPGGSLRLSCAASGYTFTNYGMN |
| | | | | WVRQAPGKGLEWVGWINTYTGEPTYAADFKRRFTF |
| | | | | SLDTSKSTAYLQMNSLRAEDTAVYYCAKYPHYYGS |
| | | | | SHWYFDVWGQGTLVTVSSASTKGPSVFPLAPEVQL |
| | | | | VQSGAEVKKPGESLKISCKGSGYSFTTYWMHWVRQ |
| | | | | MPGKGLEWMGEINPTNGHTNYNPSFQGQVTISADK |
| | | | | SISTAYLQWSSLKASDTAMYYCARNYVGSIFDYWG |
| | | | | QGTLVTVSS |
| 823 | DVD666L | AB014VL | AB079VL | DIQMTQSPSSLSASVGDRVTITCSASQDISNYLNW |
| | | | | YQQKPGKAPKVLIYFTSSLHSGVPSRFSGSGSGTD |
| | | | | FTLTISSLQPEDFATYYCQQYSTVPWTFGQGTKVE |
| | | | | IKRTVAAPSVFIFPPDIQMTQSPSSLSASVGDRVT |
| | | | | ITCKASENVVSYVSWYQQKPGKAPKLLIYGASNRN |
| | | | | TGVPSRFSGSGSGTDFTLTISSLQPEDFATYYCGQ |
| | | | | SYNYPYTFGQGTKLEIKR |

### Example 2.179

### Generation of HGF (Seq. 2) and VEGF (Seq. 1) DVD-Igs with Linker Set 3

TABLE 232

| | DVD | Outer | Inner | |
|---|---|---|---|---|
| SEQ | Variable | Variable | Variable | |
| ID | Domain | Domain | Domain | Sequence |
| NO | Name | Name | Name | 12345678901234567890123456789012345 |
| 824 | DVD671VH | AB079VH | AB014VH | EVQLVQSGAEVKKPGESLKISCKGSGYSFTTYWMH |
| | | | | WVRQMPGKGLEWMGEINPTNGHTNYNPSFQGQVTI |
| | | | | SADKSISTAYLQWSSLKASDTAMYYCARNYVGSIF |
| | | | | DYWGQGTLVTVSSASTKGPSVFPLAPEVQLVESGG |
| | | | | GLVQPGGSLRLSCAASGYTFTNYGMNWVRQAPGKG |
| | | | | LEWVGWINTYTGEPTYAADFKRRFTFSLDTSKSTA |
| | | | | YLQMNSLRAEDTAVYYCAKYPHYYGSSHWYFDVWG |
| | | | | QGTLVTVSS |
| 825 | DVD671VL | AB079VL | AB014VL | DIQMTQSPSSLSASVGDRVTITCKASENVVSYVSW |
| | | | | YQQKPGKAPKLLIYGASNRNTGVPSRFSGSGSGTD |
| | | | | FTLTISSLQPEDFATYYCGQSYNYPYTFGQGTKLE |
| | | | | IKRTVAAPDIQMTQSPSSLSASVGDRVTITCSASQ |
| | | | | DISNYLNWYQQKPGKAPKVLIYFTSSLHSGVPSRF |
| | | | | SGSGSGTDFTLTISSLQPEDFATYYCQQYSTVPWT |
| | | | | FGQGTKVEIKR |
| 826 | DVD672VH | AB014VH | AB079VH | EVQLVESGGGLVQPGGSLRLSCAASGYTFTNYGMN |
| | | | | WVRQAPGKGLEWVGWINTYTGEPTYAADFKRRFTF |
| | | | | SLDTSKSTAYLQMNSLRAEDTAVYYCAKYPHYYGS |
| | | | | SHWYFDVWGQGTLVTVSSASTKGPSVFPLAPEVQL |
| | | | | VQSGAEVKKPGESLKISCKGSGYSFTTYWMHWVRQ |
| | | | | MPGKGLEWMGEINPTNGHTNYNPSFQGQVTISADK |
| | | | | SISTAYLQWSSLKASDTAMYYCARNYVGSIFDYWG |
| | | | | QGTLVTVSS |
| 827 | DVD672VL | AB014VL | AB079VL | DIQMTQSPSSLSASVGDRVTITCSASQDISNYLNW |
| | | | | YQQKPGKAPKVLIYFTSSLHSGVPSRFSGSGSGTD |
| | | | | FTLTISSLQPEDFATYYCQQYSTVPWTFGQGTKVE |
| | | | | IKRTVAAPDIQMTQSPSSLSASVGDRVTITCKASE |
| | | | | NVVSYVSWYQQKPGKAPKLLIYGASNRNTGVPSRF |
| | | | | SGSGSGTDFTLTISSLQPEDFATYYCGQSYNYPYT |
| | | | | FGQGTKLEIKR |

### Example 2.180

### Generation of HGF (Seq. 2) and VEGF (Seq. 1) DVD-Igs with Linker Set 4

TABLE 233

| | DVD | Outer | Inner | |
|---|---|---|---|---|
| SEQ | Variable | Variable | Variable | |
| ID | Domain | Domain | Domain | Sequence |
| NO | Name | Name | Name | 12345678901234567890123456789012345 |
| 828 | DVD677VH | AB079VH | AB014VH | EVQLVQSGAEVKKPGESLKISCKGSGYSFTTYWMH |
| | | | | WVRQMPGKGLEWMGEINPTNGHTNYNPSFQGQVTI |
| | | | | SADKSISTAYLQWSSLKASDTAMYYCARNYVGSIF |
| | | | | DYWGQGTLVTVSSASTKGPEVQLVESGGGLVQPGG |
| | | | | SLRLSCAASGYTFTNYGMNWVRQAPGKGLEWVGWI |
| | | | | NTYTGEPTYAADFKRRFTFSLDTSKSTAYLQMNSL |
| | | | | RAEDTAVYYCAKYPHYYGSSHWYFDVWGQGTLVTV |
| | | | | SS |
| 829 | DVD677VL | AB079VL | AB014VL | DIQMTQSPSSLSASVGDRVTITCKASENVVSYVSW |
| | | | | YQQKPGKAPKLLIYGASNRNTGVPSRFSGSGSGTD |
| | | | | FTLTISSLQPEDFATYYCGQSYNYPYTFGQGTKLE |
| | | | | IKRTVAAPSVFIFPPDIQMTQSPSSLSASVGDRVT |
| | | | | ITCSASQDISNYLNWYQQKPGKAPKVLIYFTSSLH |
| | | | | SGVPSRFSGSGSGTDFTLTISSLQPEDFATYYCQQ |
| | | | | YSTVPWTFGQGTKVEIKR |
| 830 | DVD678VH | AB014VH | AB079VH | EVQLVESGGGLVQPGGSLRLSCAASGYTFTNYGMN |
| | | | | WVRQAPGKGLEWVGWINTYTGEPTYAADFKRRFTF |
| | | | | SLDTSKSTAYLQMNSLRAEDTAVYYCAKYPHYYGS |
| | | | | SHWYFDVWGQGTLVTVSSASTKGPEVQLVQSGAEV |
| | | | | KKPGESLKISCKGSGYSFTTYWMHWVRQMPGKGLE |
| | | | | WMGEINPTNGHTNYNPSFQGQVTISADKSISTAYL |
| | | | | QWSSLKASDTAMYYCARNYVGSIFDYWGQGTLVTV |
| | | | | SS |
| 831 | DVD678VL | AB014VL | AB079VL | DIQMTQSPSSLSASVGDRVTITCSASQDISNYLNW |
| | | | | YQQKPGKAPKVLIYFTSSLHSGVPSRFSGSGSGTD |
| | | | | FTLTISSLQPEDFATYYCQQYSTVPWTFGQGTKVE |
| | | | | IKRTVAAPSVFIFPPDIQMTQSPSSLSASVGDRVT |
| | | | | ITCKASENVVSYVSWYQQKPGKAPKLLIYGASNRN |
| | | | | TGVPSRFSGSGSGTDFTLTISSLQPEDFATYYCGQ |
| | | | | SYNYPYTFGQGTKLEIKR |

### Example 2.181

### Generation of HGF (Seq. 2) and VEGF (Seq. 2) DVD-Igs with Linker Set 1

TABLE 234

| | DVD | Outer | Inner | |
|---|---|---|---|---|
| SEQ | Variable | Variable | Variable | |
| ID | Domain | Domain | Domain | Sequence |
| NO | Name | Name | Name | 12345678901234567890123456789012345 |
| 832 | DVD661H | AB079VH | AB070VH | EVQLVQSGAEVKKPGESLKISCKGSGYSFTTYWMH |
| | | | | WVRQMPGKGLEWMGEINPTNGHTNYNPSFQGQVTI |
| | | | | SADKSISTAYLQWSSLKASDTAMYYCARNYVGSIF |
| | | | | DYWGQGTLVTVSSASTKGPEVQLVESGGGLVQPGG |
| | | | | SLRLSCAASGFTISDYWIHWVRQAPGKGLEWVAGI |
| | | | | TPAGGYTYYADSVKGRFTISADTSKNTAYLQMNSL |
| | | | | RAEDTAVYYCARFVFFLPYAMDYWGQGTLVTVSS |
| 833 | DVD661L | AB079VL | AB070VL | DIQMTQSPSSLSASVGDRVTITCKASENVVSYVSW |
| | | | | YQQKPGKAPKLLIYGASNRNTGVPSRFSGSGSGTD |
| | | | | FTLTISSLQPEDFATYYCGQSYNYPYTFGQGTKLE |
| | | | | IKRTVAAPDIQMTQSPSSLSASVGDRVTITCRASQ |
| | | | | DVSTAVAWYQQKPGKAPKLLIYSASFLYSGVPSRF |
| | | | | SGSGSGTDFTLTISSLQPEDFATYYCQQSYTTPPT |
| | | | | FGQGTKVEIKR |
| 834 | DVD662H | AB070VH | AB079VH | EVQLVESGGGLVQPGGSLRLSCAASGFTISDYWIH |
| | | | | WVRQAPGKGLEWVAGITPAGGYTYYADSVKGRFTI |
| | | | | SADTSKNTAYLQMNSLRAEDTAVYYCARFVFFLPY |
| | | | | AMDYWGQGTLVTVSSASTKGPEVQLVQSGAEVKKP |
| | | | | GESLKISCKGSGYSFTTYWMHWVRQMPGKGLEWMG |
| | | | | EINPTNGHTNYNPSFQGQVTISADKSISTAYLQWS |
| | | | | SLKASDTAMYYCARNYVGSIFDYWGQGTLVTVSS |
| 835 | DVD662L | AB070VL | AB079VL | DIQMTQSPSSLSASVGDRVTITCRASQDVSTAVAW |
| | | | | YQQKPGKAPKLLIYSASFLYSGVPSRFSGSGSGTD |
| | | | | FTLTISSLQPEDFATYYCQQSYTTPPTFGQGTKVE |
| | | | | IKRTVAAPDIQMTQSPSSLSASVGDRVTITCKASE |
| | | | | NVVSYVSWYQQKPGKAPKLLIYGASNRNTGVPSRF |
| | | | | SGSGSGTDFTLTISSLQPEDFATYYCGQSYNYPYT |
| | | | | FGQGTKLEIKR |

### Example 2.182

### Generation of HGF (Seq. 2) and VEGF (Seq. 2) DVD-Igs with Linker Set 2

TABLE 235

| | DVD | Outer | Inner | |
|---|---|---|---|---|
| SEQ | Variable | Variable | Variable | |
| ID | Domain | Domain | Domain | Sequence |
| NO | Name | Name | Name | 12345678901234567890123456789012345 |
| 836 | DVD667H | AB079VH | AB070VH | EVQLVQSGAEVKKPGESLKISCKGSGYSFTTYWMH |
| | | | | WVRQMPGKGLEWMGEINPTNGHTNYNPSFQGQVTI |
| | | | | SADKSISTAYLQWSSLKASDTAMYYCARNYVGSIF |
| | | | | DYWGQGTLVTVSSASTKGPSVFPLAPEVQLVESGG |
| | | | | GLVQPGGSLRLSCAASGFTISDYWIHWVRQAPGKG |
| | | | | LEWVAGITPAGGYTYYADSVKGRFTISADTSKNTA |
| | | | | YLQMNSLRAEDTAVYYCARFVFFLPYAMDYWGQGT |
| | | | | LVTVSS |
| 837 | DVD667L | AB079VL | AB070VL | DIQMTQSPSSLSASVGDRVTITCKASENVVSYVSW |
| | | | | YQQKPGKAPKLLIYGASNRNTGVPSRFSGSGSGTD |
| | | | | FTLTISSLQPEDFATYYCGQSYNYPYTFGQGTKLE |
| | | | | IKRTVAAPSVFIFPPDIQMTQSPSSLSASVGDRVT |
| | | | | ITCRASQDVSTAVAWYQQKPGKAPKLLIYSASFLY |
| | | | | SGVPSRFSGSGSGTDFTLTISSLQPEDFATYYCQQ |
| | | | | SYTTPPTFGQGTKVEIKR |
| 838 | DVD668H | AB070VH | AB079VH | EVQLVESGGGLVQPGGSLRLSCAASGFTISDYWIH |
| | | | | WVRQAPGKGLEWVAGITPAGGYTYYADSVKGRFTI |
| | | | | SADTSKNTAYLQMNSLRAEDTAVYYCARFVFFLPY |
| | | | | AMDYWGQGTLVTVSSASTKGPSVFPLAPEVQLVQS |
| | | | | GAEVKKPGESLKISCKGSGYSFTTYWMHWVRQMPG |
| | | | | KGLEWMGEINPTNGHTNYNPSFQGQVTISADKSIS |
| | | | | TAYLQWSSLKASDTAMYYCARNYVGSIFDYWGQGT |
| | | | | LVTVSS |
| 839 | DVD668L | AB070VL | AB079VL | DIQMTQSPSSLSASVGDRVTITCRASQDVSTAVAW |
| | | | | YQQKPGKAPKLLIYSASFLYSGVPSRFSGSGSGTD |
| | | | | FTLTISSLQPEDFATYYCQQSYTTPPTFGQGTKVE |
| | | | | IKRTVAAPSVFIFPPDIQMTQSPSSLSASVGDRVT |
| | | | | ITCKASENVVSYVSWYQQKPGKAPKLLIYGASNRN |
| | | | | TGVPSRFSGSGSGTDFTLTISSLQPEDFATYYCGQ |
| | | | | SYNYPYTFGQGTKLEIKR |

### Example 2.183

### Generation of HGF (Seq. 2) and VEGF (Seq. 2) DVD-Igs with Linker Set 3

TABLE 236

| | DVD | Outer | Inner | |
|---|---|---|---|---|
| SEQ | Variable | Variable | Variable | |
| ID | Domain | Domain | Domain | Sequence |
| NO | Name | Name | Name | 12345678901234567890123456789012345 |
| 840 | DVD673VH | AB079VH | AB070VH | EVQLVQSGAEVKKPGESLKISCKGSGYSFTTYWMH |
| | | | | WVRQMPGKGLEWMGEINPTNGHTNYNPSFQGQVTI |
| | | | | SADKSISTAYLQWSSLKASDTAMYYCARNYVGSIF |
| | | | | DYWGQGTLVTVSSASTKGPSVFPLAPEVQLVESGG |
| | | | | GLVQPGGSLRLSCAASGFTISDYWIHWVRQAPGKG |
| | | | | LEWVAGITPAGGYTYYADSVKGRFTISADTSKNTA |
| | | | | YLQMNSLRAEDTAVYYCARFVFFLPYAMDYWGQGT |
| | | | | LVTVSS |
| 841 | DVD673VL | AB079VL | AB070VL | DIQMTQSPSSLSASVGDRVTITCKASENVVSYVSW |
| | | | | YQQKPGKAPKLLIYGASNRNTGVPSRFSGSGSGTD |
| | | | | FTLTISSLQPEDFATYYCGQSYNYPYTFGQGTKLE |
| | | | | IKRTVAAPDIQMTQSPSSLSASVGDRVTITCRASQ |
| | | | | DVSTAVAWYQQKPGKAPKLLIYSASFLYSGVPSRF |
| | | | | SGSGSGTDFTLTISSLQPEDFATYYCQQSYTTPPT |
| | | | | FGQGTKVEIKR |
| 842 | DVD674VH | AB070VH | AB079VH | EVQLVESGGGLVQPGGSLRLSCAASGFTISDYWIH |
| | | | | WVRQAPGKGLEWVAGITPAGGYTYYADSVKGRFTI |
| | | | | SADTSKNTAYLQMNSLRAEDTAVYYCARFVFFLPY |
| | | | | AMDYWGQGTLVTVSSASTKGPSVFPLAPEVQLVQS |
| | | | | GAEVKKPGESLKISCKGSGYSFTTYWMHWVRQMPG |
| | | | | KGLEWMGEINPTNGHTNYNPSFQGQVTISADKSIS |
| | | | | TAYLQWSSLKASDTAMYYCARNYVGSIFDYWGQGT |
| | | | | LVTVSS |
| 843 | DVD674VL | AB070VL | AB079VL | DIQMTQSPSSLSASVGDRVTITCRASQDVSTAVAW |
| | | | | YQQKPGKAPKLLIYSASFLYSGVPSRFSGSGSGTD |
| | | | | FTLTISSLQPEDFATYYCQQSYTTPPTFGQGTKVE |
| | | | | IKRTVAAPDIQMTQSPSSLSASVGDRVTITCKASE |
| | | | | NVVSYVSWYQQKPGKAPKLLIYGASNRNTGVPSRF |
| | | | | SGSGSGTDFTLTISSLQPEDFATYYCGQSYNYPYT |
| | | | | FGQGTKLEIKR |

### Example 2.184

### Generation of HGF (Seq. 2) and VEGF (Seq. 2) DVD-Igs with Linker Set 4

TABLE 237

| | DVD | Outer | Inner | |
|---|---|---|---|---|
| SEQ | Variable | Variable | Variable | |
| ID | Domain | Domain | Domain | Sequence |
| NO | Name | Name | Name | 12345678901234567890123456789012345 |
| 844 | DVD679VH | AB079VH | AB070VH | EVQLVQSGAEVKKPGESLKISCKGSGYSFTTYWMH |
| | | | | WVRQMPGKGLEWMGEINPTNGHTNYNPSFQGQVTI |
| | | | | SADKSISTAYLQWSSLKASDTAMYYCARNYVGSIF |
| | | | | DYWGQGTLVTVSSASTKGPEVQLVESGGGLVQPGG |
| | | | | SLRLSCAASGFTISDYWIHWVRQAPGKGLEWVAGI |
| | | | | TPAGGYTYYADSVKGRFTISADTSKNTAYLQMNSL |
| | | | | RAEDTAVYYCARFVFFLPYAMDYWGQGTLVTVSS |
| 845 | DVD679VL | AB079VL | AB070VL | DIQMTQSPSSLSASVGDRVTITCKASENVVSYVSW |
| | | | | YQQKPGKAPKLLIYGASNRNTGVPSRFSGSGSGTD |
| | | | | FTLTISSLQPEDFATYYCGQSYNYPYTFGQGTKLE |
| | | | | IKRTVAAPSVFIFPPDIQMTQSPSSLSASVGDRVT |
| | | | | ITCRASQDVSTAVAWYQQKPGKAPKLLIYSASFLY |
| | | | | SGVPSRFSGSGSGTDFTLTISSLQPEDFATYYCQQ |
| | | | | SYTTPPTFGQGTKVEIKR |
| 846 | DVD680VH | AB070VH | AB079VH | EVQLVESGGGLVQPGGSLRLSCAASGFTISDYWIH |
| | | | | WVRQAPGKGLEWVAGITPAGGYTYYADSVKGRFTI |
| | | | | SADTSKNTAYLQMNSLRAEDTAVYYCARFVFFLPY |
| | | | | AMDYWGQGTLVTVSSASTKGPEVQLVQSGAEVKKP |
| | | | | GESLKISCKGSGYSFTTYWMHWVRQMPGKGLEWMG |
| | | | | EINPTNGHTNYNPSFQGQVTISADKSISTAYLQWS |
| | | | | SLKASDTAMYYCARNYVGSIFDYWGQGTLVTVSS |
| 847 | DVD680VL | AB070VL | AB079VL | DIQMTQSPSSLSASVGDRVTITCRASQDVSTAVAW |
| | | | | YQQKPGKAPKLLIYSASFLYSGVPSRFSGSGSGTD |
| | | | | FTLTISSLQPEDFATYYCQQSYTTPPTFGQGTKVE |
| | | | | IKRTVAAPSVFIFPPDIQMTQSPSSLSASVGDRVT |
| | | | | ITCKASENVVSYVSWYQQKPGKAPKLLIYGASNRN |
| | | | | TGVPSRFSGSGSGTDFTLTISSLQPEDFATYYCGQ |
| | | | | SYNYPYTFGQGTKLEIKR |

### Example 2.185

### Generation of HGF (Seq. 2) and VEGF (Seq. 3) DVD-Igs with Linker Set 1

TABLE 238

| | DVD | Outer | Inner | |
|---|---|---|---|---|
| SEQ | Variable | Variable | Variable | |
| ID | Domain | Domain | Domain | Sequence |
| NO | Name | Name | Name | 12345678901234567890123456789012345 |
| 848 | DVD663H | AB079VH | AB071VH | EVQLVQSGAEVKKPGESLKISCKGSGYSFTTYWMH |
| | | | | WVRQMPGKGLEWMGEINPTNGHTNYNPSFQGQVTI |
| | | | | SADKSISTAYLQWSSLKASDTAMYYCARNYVGSIF |
| | | | | DYWGQGTLVTVSSASTKGPEVQLVESGGGLVQPGG |
| | | | | SLRLSCAASGFTINASWIHWVRQAPGKGLEWVGAI |
| | | | | YPYSGYTNYADSVKGRFTISADTSKNTAYLQMNSL |
| | | | | RAEDTAVYYCARWGHSTSPWAMDYWGQGTLVTVSS |
| 849 | DVD663L | AB079VL | AB071VL | DIQMTQSPSSLSASVGDRVTITCKASENVVSYVSW |
| | | | | YQQKPGKAPKLLIYGASNRNTGVPSRFSGSGSGTD |
| | | | | FTLTISSLQPEDFATYYCGQSYNYPYTFGQGTKLE |
| | | | | IKRTVAAPDIQMTQSPSSLSASVGDRVTITCRASQ |
| | | | | VIRRSLAWYQQKPGKAPKLLIYAASNLASGVPSRF |
| | | | | SGSGSGTDFTLTISSLQPEDFATYYCQQSNTSPLT |
| | | | | FGQGTKVEIKR |
| 850 | DVD664H | AB071VH | AB079VH | EVQLVESGGGLVQPGGSLRLSCAASGFTINASWIH |
| | | | | WVRQAPGKGLEWVGAIYPYSGYTNYADSVKGRFTI |
| | | | | SADTSKNTAYLQMNSLRAEDTAVYYCARWGHSTSP |
| | | | | WAMDYWGQGTLVTVSSASTKGPEVQLVQSGAEVKK |
| | | | | PGESLKISCKGSGYSFTTYWMHWVRQMPGKGLEWM |
| | | | | GEINPTNGHTNYNPSFQGQVTISADKSISTAYLQW |
| | | | | SSLKASDTAMYYCARNYVGSIFDYWGQGTLVTVSS |
| 851 | DVD664L | AB071VL | AB079VL | DIQMTQSPSSLSASVGDRVTITCRASQVIRRSLAW |
| | | | | YQQKPGKAPKLLIYAASNLASGVPSRFSGSGSGTD |
| | | | | FTLTISSLQPEDFATYYCQQSNTSPLTFGQGTKVE |
| | | | | IKRTVAAPDIQMTQSPSSLSASVGDRVTITCKASE |
| | | | | NVVSYVSWYQQKPGKAPKLLIYGASNRNTGVPSRF |
| | | | | SGSGSGTDFTLTISSLQPEDFATYYCGQSYNYPYT |
| | | | | FGQGTKLEIKR |

### Example 2.186

### Generation of HGF (Seq. 2) and VEGF (Seq. 3) DVD-Igs with Linker Set 2

TABLE 239

| | DVD | Outer | Inner | |
|---|---|---|---|---|
| SEQ | Variable | Variable | Variable | |
| ID | Domain | Domain | Domain | Sequence |
| NO | Name | Name | Name | 12345678901234567890123456789012345 |
| 852 | DVD669H | AB079VH | AB071VH | EVQLVQSGAEVKKPGESLKISCKGSGYSFTTYWMH |
| | | | | WVRQMPGKGLEWMGEINPTNGHTNYNPSFQGQVTI |
| | | | | SADKSISTAYLQWSSLKASDTAMYYCARNYVGSIF |
| | | | | DYWGQGTLVTVSSASTKGPSVFPLAPEVQLVESGG |
| | | | | GLVQPGGSLRLSCAASGFTINASWIHWVRQAPGKG |
| | | | | LEWVGAIYPYSGYTNYADSVKGRFTISADTSKNTA |
| | | | | YLQMNSLRAEDTAVYYCARWGHSTSPWAMDYWGQG |
| | | | | TLVTVSS |
| 853 | DVD669L | AB079VL | AB071VL | DIQMTQSPSSLSASVGDRVTITCKASENVVSYVSW |
| | | | | YQQKPGKAPKLLIYGASNRNTGVPSRFSGSGSGTD |
| | | | | FTLTISSLQPEDFATYYCGQSYNYPYTFGQGTKLE |
| | | | | IKRTVAAPSVFIFPPDIQMTQSPSSLSASVGDRVT |
| | | | | ITCRASQVIRRSLAWYQQKPGKAPKLLIYAASNLA |
| | | | | SGVPSRFSGSGSGTDFTLTISSLQPEDFATYYCQQ |
| | | | | SNTSPLTFGQGTKVEIKR |
| 854 | DVD670H | AB071VH | AB079VH | EVQLVESGGGLVQPGGSLRLSCAASGFTINASWIH |
| | | | | WVRQAPGKGLEWVGAIYPYSGYTNYADSVKGRFTI |
| | | | | SADTSKNTAYLQMNSLRAEDTAVYYCARWGHSTSP |
| | | | | WAMDYWGQGTLVTVSSASTKGPSVFPLAPEVQLVQ |
| | | | | SGAEVKKPGESLKISCKGSGYSFTTYWMHWVRQMP |
| | | | | GKGLEWMGEINPTNGHTNYNPSFQGQVTISADKSI |
| | | | | STAYLQWSSLKASDTAMYYCARNYVGSIFDYWGQG |
| | | | | TLVTVSS |
| 855 | DVD670L | AB071VL | AB079VL | DIQMTQSPSSLSASVGDRVTITCRASQVIRRSLAW |
| | | | | YQQKPGKAPKLLIYAASNLASGVPSRFSGSGSGTD |
| | | | | FTLTISSLQPEDFATYYCQQSNTSPLTFGQGTKVE |
| | | | | IKRTVAAPSVFIFPPDIQMTQSPSSLSASVGDRVT |
| | | | | ITCKASENVVSYVSWYQQKPGKAPKLLIYGASNRN |
| | | | | TGVPSRFSGSGSGTDFTLTISSLQPEDFATYYCGQ |
| | | | | SYNYPYTFGQGTKLEIKR |

### Example 2.187

### Generation of HGF (Seq. 2) and VEGF (Seq. 3) DVD-Igs with Linker Set 3

TABLE 240

| | DVD | Outer | Inner | |
|---|---|---|---|---|
| SEQ | Variable | Variable | Variable | |
| ID | Domain | Domain | Domain | Sequence |
| NO | Name | Name | Name | 12345678901234567890123456789012345 |
| 856 | DVD675VH | AB079VH | AB071VH | EVQLVQSGAEVKKPGESLKISCKGSGYSFTTYWMH |
| | | | | WVRQMPGKGLEWMGEINPTNGHTNYNPSFQGQVTI |
| | | | | SADKSISTAYLQWSSLKASDTAMYYCARNYVGSIF |
| | | | | DYWGQGTLVTVSSASTKGPSVFPLAPEVQLVESGG |
| | | | | GLVQPGGSLRLSCAASGFTINASWIHWVRQAPGKG |
| | | | | LEWVGAIYPYSGYTNYADSVKGRFTISADTSKNTA |
| | | | | YLQMNSLRAEDTAVYYCARWGHSTSPWAMDYWGQG |
| | | | | TLVTVSS |
| 857 | DVD675VL | AB079VL | AB071VL | DIQMTQSPSSLSASVGDRVTITCKASENVVSYVSW |
| | | | | YQQKPGKAPKLLIYGASNRNTGVPSRFSGSGSGTD |
| | | | | FTLTISSLQPEDFATYYCGQSYNYPYTFGQGTKLE |
| | | | | IKRTVAAPDIQMTQSPSSLSASVGDRVTITCRASQ |
| | | | | VIRRSLAWYQQKPGKAPKLLIYAASNLASGVPSRF |
| | | | | SGSGSGTDFTLTISSLQPEDFATYYCQQSNTSPLT |
| | | | | FGQGTKVEIKR |
| 858 | DVD676VH | AB071VH | AB079VH | EVQLVESGGGLVQPGGSLRLSCAASGFTINASWIH |
| | | | | WVRQAPGKGLEWVGAIYPYSGYTNYADSVKGRFTI |
| | | | | SADTSKNTAYLQMNSLRAEDTAVYYCARWGHSTSP |
| | | | | WAMDYWGQGTLVTVSSASTKGPSVFPLAPEVQLVQ |
| | | | | SGAEVKKPGESLKISCKGSGYSFTTYWMHWVRQMP |
| | | | | GKGLEWMGEINPTNGHTNYNPSFQGQVTISADKSI |
| | | | | STAYLQWSSLKASDTAMYYCARNYVGSIFDYWGQG |
| | | | | TLVTVSS |
| 859 | DVD676VL | AB071VL | AB079VL | DIQMTQSPSSLSASVGDRVTITCRASQVIRRSLAW |
| | | | | YQQKPGKAPKLLIYAASNLASGVPSRFSGSGSGTD |
| | | | | FTLTISSLQPEDFATYYCQQSNTSPLTFGQGTKVE |
| | | | | IKRTVAAPDIQMTQSPSSLSASVGDRVTITCKASE |
| | | | | NVVSYVSWYQQKPGKAPKLLIYGASNRNTGVPSRF |
| | | | | SGSGSGTDFTLTISSLQPEDFATYYCGQSYNYPYT |
| | | | | FGQGTKLEIKR |

### Example 2.188

### Generation of HGF (Seq. 2) and VEGF (Seq. 3) DVD-Igs with Linker Set 4

TABLE 241

| | DVD | Outer | Inner | |
|---|---|---|---|---|
| SEQ | Variable | Variable | Variable | |
| ID | Domain | Domain | Domain | Sequence |
| NO | Name | Name | Name | 12345678901234567890123456789012345 |
| 860 | DVD681VH | AB079VH | AB071VH | EVQLVQSGAEVKKPGESLKISCKGSGYSFTTYWMH |
| | | | | WVRQMPGKGLEWMGEINPTNGHTNYNPSFQGQVTI |
| | | | | SADKSISTAYLQWSSLKASDTAMYYCARNYVGSIF |
| | | | | DYWGQGTLVTVSSASTKGPEVQLVESGGGLVQPGG |
| | | | | SLRLSCAASGFTINASWIHWVRQAPGKGLEWVGAI |
| | | | | YPYSGYTNYADSVKGRFTISADTSKNTAYLQMNSL |
| | | | | RAEDTAVYYCARWGHSTSPWAMDYWGQGTLVTVSS |
| 861 | DVD681VL | AB079VL | AB071VL | DIQMTQSPSSLSASVGDRVTITCKASENVVSYVSW |
| | | | | YQQKPGKAPKLLIYGASNRNTGVPSRFSGSGSGTD |
| | | | | FTLTISSLQPEDFATYYCGQSYNYPYTFGQGTKLE |
| | | | | IKRTVAAPSVFIFPPDIQMTQSPSSLSASVGDRVT |
| | | | | ITCRASQVIRRSLAWYQQKPGKAPKLLIYAASNLA |
| | | | | SGVPSRFSGSGSGTDFTLTISSLQPEDFATYYCQQ |
| | | | | SNTSPLTFGQGTKVEIKR |
| 862 | DVD682VH | AB071VH | AB079VH | EVQLVESGGGLVQPGGSLRLSCAASGFTINASWIH |
| | | | | WVRQAPGKGLEWVGAIYPYSGYTNYADSVKGRFTI |
| | | | | SADTSKNTAYLQMNSLRAEDTAVYYCARWGHSTSP |
| | | | | WAMDYWGQGTLVTVSSASTKGPEVQLVQSGAEVKK |
| | | | | PGESLKISCKGSGYSFTTYWMHWVRQMPGKGLEWM |
| | | | | GEINPTNGHTNYNPSFQGQVTISADKSISTAYLQW |
| | | | | SSLKASDTAMYYCARNYVGSIFDYWGQGTLVTVSS |
| 863 | DVD682VL | AB071VL | AB079VL | DIQMTQSPSSLSASVGDRVTITCRASQVIRRSLAW |
| | | | | YQQKPGKAPKLLIYAASNLASGVPSRFSGSGSGTD |
| | | | | FTLTISSLQPEDFATYYCQQSNTSPLTFGQGTKVE |
| | | | | IKRTVAAPSVFIFPPDIQMTQSPSSLSASVGDRVT |
| | | | | ITCKASENVVSYVSWYQQKPGKAPKLLIYGASNRN |
| | | | | TGVPSRFSGSGSGTDFTLTISSLQPEDFATYYCGQ |
| | | | | SYNYPYTFGQGTKLEIKR |

### Example 2.189

### Generation of HER2 (Seq. 1) and HER2 (Seq. 2) DVD-Igs with Linker Set 1

TABLE 242

| | DVD | Outer | Inner | |
|---|---|---|---|---|
| SEQ | Variable | Variable | Variable | |
| ID | Domain | Domain | Domain | Sequence |
| NO | Name | Name | Name | 12345678901234567890123456789012345 |
| 864 | DVD687H | AB004VH | AB080VH | EVQLVESGGGLVQPGGSLRLSCAASGFNIKDTYIH |
| | | | | WVRQAPGKGLEWVARIYPTNGYTRYADSVKGRFTI |
| | | | | SADTSKNTAYLQMNSLRAEDTAVYYCSRWGGDGFY |
| | | | | AMDYWGQGTLVTVSSASTKGPEVQLVESGGGLVQP |
| | | | | GGSLRLSCAASGFTFTDYTMDWVRQAPGKGLEWVA |
| | | | | DVNPNSGGSIYNQRFKGRFTLSVDRSKNTLYLQMN |
| | | | | SLRAEDTAVYYCARNLGPSFYFDYWGQGTLVTVSS |
| 865 | DVD687L | AB004VL | AB080VL | DIQMTQSPSSLSASVGDRVTITCRASQDVNTAVAW |
| | | | | YQQKPGKAPKLLIYSASFLYSGVPSRFSGSRSGTD |
| | | | | FTLTISSLQPEDFATYYCQQHYTTPPTFGQGTKVE |
| | | | | IKRTVAAPDIQMTQSPSSLSASVGDRVTITCKASQ |
| | | | | DVSIGVAWYQQKPGKAPKLLIYSASYRYTGVPSRF |
| | | | | SGSGSGTDFTLTISSLQPEDFATYYCQQYYIYPYT |
| | | | | FGQGTKVEIKR |
| 866 | DVD688H | AB080VH | AB004VH | EVQLVESGGGLVQPGGSLRLSCAASGFTFTDYTMD |
| | | | | WVRQAPGKGLEWVADVNPNSGGSIYNQRFKGRFTL |
| | | | | SVDRSKNTLYLQMNSLRAEDTAVYYCARNLGPSFY |
| | | | | FDYWGQGTLVTVSSASTKGPEVQLVESGGGLVQPG |
| | | | | GSLRLSCAASGFNIKDTYIHWVRQAPGKGLEWVAR |
| | | | | IYPTNGYTRYADSVKGRFTISADTSKNTAYLQMNS |
| | | | | LRAEDTAVYYCSRWGGDGFYAMDYWGQGTLVTVSS |
| 867 | DVD688L | AB080VL | AB004VL | DIQMTQSPSSLSASVGDRVTITCKASQDVSIGVAW |
| | | | | YQQKPGKAPKLLIYSASYRYTGVPSRFSGSGSGTD |
| | | | | FTLTISSLQPEDFATYYCQQYYIYPYTFGQGTKVE |
| | | | | IKRTVAAPDIQMTQSPSSLSASVGDRVTITCRASQ |
| | | | | DVNTAVAWYQQKPGKAPKLLIYSASFLYSGVPSRF |
| | | | | SGSRSGTDFTLTISSLQPEDFATYYCQQHYTTPPT |
| | | | | FGQGTKVEIKR |

### Example 2.190

### Generation of HER2 (Seq. 1) and HER2 (Seq. 2) DVD-Igs with Linker Set 2

TABLE 243

| | DVD | Outer | Inner | |
|---|---|---|---|---|
| SEQ | Variable | Variable | Variable | |
| ID | Domain | Domain | Domain | Sequence |
| NO | Name | Name | Name | 12345678901234567890123456789012345 |
| 868 | DVD689H | AB004VH | AB080VH | EVQLVESGGGLVQPGGSLRLSCAASGFNIKDTYIH |
| | | | | WVRQAPGKGLEWVARIYPTNGYTRYADSVKGRFTI |
| | | | | SADTSKNTAYLQMNSLRAEDTAVYYCSRWGGDGFY |
| | | | | AMDYWGQGTLVTVSSASTKGPSVFPLAPEVQLVES |
| | | | | GGGLVQPGGSLRLSCAASGFTFTDYTMDWVRQAPG |
| | | | | KGLEWVADVNPNSGGSIYNQRFKGRFTLSVDRSKN |
| | | | | TLYLQMNSLRAEDTAVYYCARNLGPSFYFDYWGQG |
| | | | | TLVTVSS |
| 869 | DVD689L | AB004VL | AB080VL | DIQMTQSPSSLSASVGDRVTITCRASQDVNTAVAW |
| | | | | YQQKPGKAPKLLIYSASFLYSGVPSRFSGSRSGTD |
| | | | | FTLTISSLQPEDFATYYCQQHYTTPPTFGQGTKVE |
| | | | | IKRTVAAPSVFIFPPDIQMTQSPSSLSASVGDRVT |
| | | | | ITCKASQDVSIGVAWYQQKPGKAPKLLIYSASYRY |
| | | | | TGVPSRFSGSGSGTDFTLTISSLQPEDFATYYCQQ |
| | | | | YYIYPYTFGQGTKVEIKR |
| 870 | DVD690H | AB080VH | AB004VH | EVQLVESGGGLVQPGGSLRLSCAASGFTFTDYTMD |
| | | | | WVRQAPGKGLEWVADVNPNSGGSIYNQRFKGRFTL |
| | | | | SVDRSKNTLYLQMNSLRAEDTAVYYCARNLGPSFY |
| | | | | FDYWGQGTLVTVSSASTKGPSVFPLAPEVQLVESG |
| | | | | GGLVQPGGSLRLSCAASGFNIKDTYIHWVRQAPGK |
| | | | | GLEWVARIYPTNGYTRYADSVKGRFTISADTSKNT |
| | | | | AYLQMNSLRAEDTAVYYCSRWGGDGFYAMDYWGQG |
| | | | | TLVTVSS |
| 871 | DVD690L | AB080VL | AB004VL | DIQMTQSPSSLSASVGDRVTITCKASQDVSIGVAW |
| | | | | YQQKPGKAPKLLIYSASYRYTGVPSRFSGSGSGTD |
| | | | | FTLTISSLQPEDFATYYCQQYYIYPYTFGQGTKVE |
| | | | | IKRTVAAPSVFIFPPDIQMTQSPSSLSASVGDRVT |
| | | | | ITCRASQDVNTAVAWYQQKPGKAPKLLIYSASFLY |
| | | | | SGVPSRFSGSRSGTDFTLTISSLQPEDFATYYCQQ |
| | | | | HYTTPPTFGQGTKVEIKR |

### Example 2.191

### Generation of HER2 (Seq. 1) and HER2 (Seq. 2) DVD-Igs with Linker Set 3

TABLE 244

| | DVD | Outer | Inner | |
|---|---|---|---|---|
| SEQ | Variable | Variable | Variable | |
| ID | Domain | Domain | Domain | Sequence |
| NO | Name | Name | Name | 12345678901234567890123456789012345 |
| 872 | DVD691H | AB004VH | AB080VH | EVQLVESGGGLVQPGGSLRLSCAASGFNIKDTYIH |
| | | | | WVRQAPGKGLEWVARIYPTNGYTRYADSVKGRFTI |
| | | | | SADTSKNTAYLQMNSLRAEDTAVYYCSRWGGDGFY |
| | | | | AMDYWGQGTLVTVSSASTKGPSVFPLAPEVQLVES |
| | | | | GGGLVQPGGSLRLSCAASGFTFTDYTMDWVRQAPG |
| | | | | KGLEWVADVNPNSGGSIYNQRFKGRFTLSVDRSKN |
| | | | | TLYLQMNSLRAEDTAVYYCARNLGPSFYFDYWGQG |
| | | | | TLVTVSS |
| 873 | DVD691L | AB004VL | AB080VL | DIQMTQSPSSLSASVGDRVTITCRASQDVNTAVAW |
| | | | | YQQKPGKAPKLLIYSASFLYSGVPSRFSGSRSGTD |
| | | | | FTLTISSLQPEDFATYYCQQHYTTPPTFGQGTKVE |
| | | | | IKRTVAAPDIQMTQSPSSLSASVGDRVTITCKASQ |
| | | | | DVSIGVAWYQQKPGKAPKLLIYSASYRYTGVPSRF |
| | | | | SGSGSGTDFTLTISSLQPEDFATYYCQQYYIYPYT |
| | | | | FGQGTKVEIKR |
| 874 | DVD692H | AB080VH | AB004VH | EVQLVESGGGLVQPGGSLRLSCAASGFTFTDYTMD |
| | | | | WVRQAPGKGLEWVADVNPNSGGSIYNQRFKGRFTL |
| | | | | SVDRSKNTLYLQMNSLRAEDTAVYYCARNLGPSFY |
| | | | | FDYWGQGTLVTVSSASTKGPSVFPLAPEVQLVESG |
| | | | | GGLVQPGGSLRLSCAASGFNIKDTYIHWVRQAPGK |
| | | | | GLEWVARIYPTNGYTRYADSVKGRFTISADTSKNT |
| | | | | AYLQMNSLRAEDTAVYYCSRWGGDGFYAMDYWGQG |
| | | | | TLVTVSS |
| 875 | DVD692L | AB080VL | AB004VL | DIQMTQSPSSLSASVGDRVTITCKASQDVSIGVAW |
| | | | | YQQKPGKAPKLLIYSASYRYTGVPSRFSGSGSGTD |
| | | | | FTLTISSLQPEDFATYYCQQYYIYPYTFGQGTKVE |
| | | | | IKRTVAAPDIQMTQSPSSLSASVGDRVTITCRASQ |
| | | | | DVNTAVAWYQQKPGKAPKLLIYSASFLYSGVPSRF |
| | | | | SGSRSGTDFTLTISSLQPEDFATYYCQQHYTTPPT |
| | | | | FGQGTKVEIKR |

### Example 2.192

### Generation of HER2 (Seq. 1) and HER2 (Seq. 2) DVD-Igs with Linker Set 4

TABLE 245

| | DVD | Outer | Inner | |
|---|---|---|---|---|
| SEQ | Variable | Variable | Variable | |
| ID | Domain | Domain | Domain | Sequence |
| NO | Name | Name | Name | 12345678901234567890123456789012345 |
| 876 | DVD693H | AB004VH | AB080VH | EVQLVESGGGLVQPGGSLRLSCAASGFNIKDTYIH |
| | | | | WVRQAPGKGLEWVARIYPTNGYTRYADSVKGRFTI |
| | | | | SADTSKNTAYLQMNSLRAEDTAVYYCSRWGGDGFY |
| | | | | AMDYWGQGTLVTVSSASTKGPEVQLVESGGGLVQP |
| | | | | GGSLRLSCAASGFTFTDYTMDWVRQAPGKGLEWVA |
| | | | | DVNPNSGGSIYNQRFKGRFTLSVDRSKNTLYLQMN |
| | | | | SLRAEDTAVYYCARNLGPSFYFDYWGQGTLVTVSS |
| 877 | DVD693L | AB004VL | AB080VL | DIQMTQSPSSLSASVGDRVTITCRASQDVNTAVAW |
| | | | | YQQKPGKAPKLLIYSASFLYSGVPSRFSGSRSGTD |
| | | | | FTLTISSLQPEDFATYYCQQHYTTPPTFGQGTKVE |
| | | | | IKRTVAAPSVFIFPPDIQMTQSPSSLSASVGDRVT |
| | | | | ITCKASQDVSIGVAWYQQKPGKAPKLLIYSASYRY |
| | | | | TGVPSRFSGSGSGTDFTLTISSLQPEDFATYYCQQ |
| | | | | YYIYPYTFGQGTKVEIKR |
| 878 | DVD694H | AB080VH | AB004VH | EVQLVESGGGLVQPGGSLRLSCAASGFTFTDYTMD |
| | | | | WVRQAPGKGLEWVADVNPNSGGSIYNQRFKGRFTL |
| | | | | SVDRSKNTLYLQMNSLRAEDTAVYYCARNLGPSFY |
| | | | | FDYWGQGTLVTVSSASTKGPEVQLVESGGGLVQPG |
| | | | | GSLRLSCAASGFNIKDTYIHWVRQAPGKGLEWVAR |
| | | | | IYPTNGYTRYADSVKGRFTISADTSKNTAYLQMNS |
| | | | | LRAEDTAVYYCSRWGGDGFYAMDYWGQGTLVTVSS |
| 879 | DVD694L | AB080VL | AB004VL | DIQMTQSPSSLSASVGDRVTITCKASQDVSIGVAW |
| | | | | YQQKPGKAPKLLIYSASYRYTGVPSRFSGSGSGTD |
| | | | | FTLTISSLQPEDFATYYCQQYYIYPYTFGQGTKVE |
| | | | | IKRTVAAPSVFIFPPDIQMTQSPSSLSASVGDRVT |
| | | | | ITCRASQDVNTAVAWYQQKPGKAPKLLIYSASFLY |
| | | | | SGVPSRFSGSRSGTDFTLTISSLQPEDFATYYCQQ |
| | | | | HYTTPPTFGQGTKVEIKR |

### Example 2.193

### Generation of CD3 (Seq. 2) and CD-19 (Seq. 2) DVD-Igs with Linker Set 1

TABLE 246

| | DVD | Outer | Inner | |
|---|---|---|---|---|
| SEQ | Variable | Variable | Variable | |
| ID | Domain | Domain | Domain | Sequence |
| NO | Name | Name | Name | 12345678901234567890123456789012345 |
| 880 | DVD897H | AB039VH | AB111VH | QVQLQQSGAELARPGASVKMSCKASGYTFTRYTMH |
| | | | | WVKQRPGQGLEWIGYINPSRGYTNYNQKFKDKATL |
| | | | | TTDKSSSTAYMQLSSLTSEDSAVYYCARYYDDHYC |
| | | | | LDYWGQGTTLTVSSASTKGPSVFPLAPEVKLQESG |
| | | | | PGLVAPSQSLSVTCTVSGVSLPDYGVSWIRQPPRK |
| | | | | GLEWLGVIWGSEGTTYYNSALKSRLTIIKDNSKSQ |
| | | | | VPLKMNSLQTDDTAIYYCAKHYYYGGSYAMDYWGQ |
| | | | | GTSVTVSS |
| 881 | DVD897L | AB039VL | AB111VL | QIVLTQSPAIMSASPGEKVTMTCSASSSVSYMNWY |
| | | | | QQKSGTSPKRWIYDTSKLASGVPAHFRGSGSGTSY |
| | | | | SLTISGMEAEDAATYYCQQWSSNPFTFGSGTKLEI |
| | | | | NRTVAAPSVFIFPPDIQMTQTTSSLSASLGDRVTI |
| | | | | SCRASQDISKTLNWYQQKPDGTVKLLIYHTSRLHS |
| | | | | GVPSRFSGSGSGTDYSLTISNLEQEDIATYFCQQG |
| | | | | NTLPYTFGGGTKLEITR |
| 882 | DVD898H | AB111VH | AB039VH | EVKLQESGPGLVAPSQSLSVTCTVSGVSLPDYGVS |
| | | | | WIRQPPRKGLEWLGVIWGSEGTTYYNSALKSRLTI |
| | | | | IKDNSKSQVPLKMNSLQTDDTAIYYCAKHYYYGGS |
| | | | | YAMDYWGQGTSVTVSSASTKGPSVFPLAPQVQLQQ |
| | | | | SGAELARPGASVKMSCKASGYTFTRYTMHWVKQRP |
| | | | | GQGLEWIGYINPSRGYTNYNQKFKDKATLTTDKSS |
| | | | | STAYMQLSSLTSEDSAVYYCARYYDDHYCLDYWGQ |
| | | | | GTTLTVSS |
| 883 | DVD898L | AB111VL | AB039VL | DIQMTQTTSSLSASLGDRVTISCRASQDISKTLNW |
| | | | | YQQKPDGTVKLLIYHTSRLHSGVPSRFSGSGSGTD |
| | | | | YSLTISNLEQEDIATYFCQQGNTLPYTFGGGTKLE |
| | | | | ITRTVAAPSVFIFPPQIVLTQSPAIMSASPGEKVT |
| | | | | MTCSASSSVSYMNWYQQKSGTSPKRWIYDTSKLAS |
| | | | | GVPAHFRGSGSGTSYSLTISGMEAEDAATYYCQQW |
| | | | | SSNPFTFGSGTKLEINR |

### Example 2.194

### Generation of CD3 (Seq. 3) and CD-19 (Seq. 2) DVD-Igs with Linker Set 1

TABLE 247

| | DVD | Outer | Inner | |
|---|---|---|---|---|
| SEQ | Variable | Variable | Variable | |
| ID | Domain | Domain | Domain | Sequence |
| NO | Name | Name | Name | 12345678901234567890123456789012345 |
| 884 | DVD899H | AB107VH | AB111VH | EVQLVESGGGLVQPGGSLRLSCAASGYSFTGYTMN |
| | | | | WVRQAPGKGLEWVALINPYKGVSTYNQKFKDRFTI |
| | | | | SVDKSKNTAYLQMNSLRAEDTAVYYCARSGYYGDS |
| | | | | DWYFDVWGQGTLVTVSSASTKGPSVFPLAPEVKLQ |
| | | | | ESGPGLVAPSQSLSVTCTVSGVSLPDYGVSWIRQP |
| | | | | PRKGLEWLGVIWGSEGTTYYNSALKSRLTIIKDNS |
| | | | | KSQVPLKMNSLQTDDTAIYYCAKHYYYGGSYAMDY |
| | | | | WGQGTSVTVSS |
| 885 | DVD899L | AB107VL | AB111VL | DIQMTQSPSSLSASVGDRVTITCRASQDIRNYLNW |
| | | | | YQQKPGKAPKLLIYYTSRLESGVPSRFSGSGSGTD |
| | | | | YTLTISSLQPEDFATYYCQQGNTLPWTFGQGTKVE |
| | | | | IKRTVAAPSVFIFPPDIQMTQTTSSLSASLGDRVT |
| | | | | ISCRASQDISKTLNWYQQKPDGTVKLLIYHTSRLH |
| | | | | SGVPSRFSGSGSGTDYSLTISNLEQEDIATYFCQQ |
| | | | | GNTLPYTFGGGTKLEITR |
| 886 | DVD900H | AB111VH | AB107VH | EVKLQESGPGLVAPSQSLSVTCTVSGVSLPDYGVS |
| | | | | WIRQPPRKGLEWLGVIWGSEGTTYYNSALKSRLTI |
| | | | | IKDNSKSQVPLKMNSLQTDDTAIYYCAKHYYYGGS |
| | | | | YAMDYWGQGTSVTVSSASTKGPSVFPLAPEVQLVE |
| | | | | SGGGLVQPGGSLRLSCAASGYSFTGYTMNWVRQAP |
| | | | | GKGLEWVALINPYKGVSTYNQKFKDRFTISVDKSK |
| | | | | NTAYLQMNSLRAEDTAVYYCARSGYYGDSDWYFDV |
| | | | | WGQGTLVTVSS |
| 887 | DVD900L | AB111VL | AB107VL | DIQMTQTTSSLSASLGDRVTISCRASQDISKTLNW |
| | | | | YQQKPDGTVKLLIYHTSRLHSGVPSRFSGSGSGTD |
| | | | | YSLTISNLEQEDIATYFCQQGNTLPYTFGGGTKLE |
| | | | | ITRTVAAPSVFIFPPDIQMTQSPSSLSASVGDRVT |
| | | | | ITCRASQDIRNYLNWYQQKPGKAPKLLIYYTSRLE |
| | | | | SGVPSRFSGSGSGTDYTLTISSLQPEDFATYYCQQ |
| | | | | GNTLPWTFGQGTKVEIKR |

### Example 2.195

### Generation of CD3 (Seq. 2) and CD-19 (Seq. 3) DVD-Igs with Linker Set 1

TABLE 248

| | DVD | Outer | Inner | |
|---|---|---|---|---|
| SEQ | Variable | Variable | Variable | |
| ID | Domain | Domain | Domain | Sequence |
| NO | Name | Name | Name | 12345678901234567890123456789012345 |
| 888 | DVD901H | AB039VH | AB112VH | QVQLQQSGAELARPGASVKMSCKASGYTFTRYTMH |
| | | | | WVKQRPGQGLEWIGYINPSRGYTNYNQKFKDKATL |
| | | | | TTDKSSSTAYMQLSSLTSEDSAVYYCARYYDDHYC |
| | | | | LDYWGQGTTLTVSSASTKGPSVFPLAPEVQLQESG |
| | | | | PELVKPGASVKISCKASGYAFSSSWMNWVIQRPGQ |
| | | | | GLEWIGRIYPGDGDTNYNGKFKGKATLTADKSSST |
| | | | | AYMQLSSLTSVDSAVYFCARSGFITTVLDFDYWGQ |
| | | | | GTTLTVSS |
| 889 | DVD901L | AB039VL | AB112VL | QIVLTQSPAIMSASPGEKVTMTCSASSSVSYMNWY |
| | | | | QQKSGTSPKRWIYDTSKLASGVPAHFRGSGSGTSY |
| | | | | SLTISGMEAEDAATYYCQQWSSNPFTFGSGTKLEI |
| | | | | NRTVAAPSVFIFPPDIVLTQSPTSLAVSLGQRATI |
| | | | | SCRASESVDTFGISFMNWFQQKPGQPPKLLIHAAS |
| | | | | NQGSGVPSRFSGSGSGTDFSLNIHPMEEDDSAMYF |
| | | | | CQQSKEVPFTFGSGTKLEIKR |
| 890 | DVD902H | AB112VH | AB039VH | EVQLQESGPELVKPGASVKISCKASGYAFSSSWMN |
| | | | | WVIQRPGQGLEWIGRIYPGDGDTNYNGKFKGKATL |
| | | | | TADKSSSTAYMQLSSLTSVDSAVYFCARSGFITTV |
| | | | | LDFDYWGQGTTLTVSSASTKGPSVFPLAPQVQLQQ |
| | | | | SGAELARPGASVKMSCKASGYTFTRYTMHWVKQRP |
| | | | | GQGLEWIGYINPSRGYTNYNQKFKDKATLTTDKSS |
| | | | | STAYMQLSSLTSEDSAVYYCARYYDDHYCLDYWGQ |
| | | | | GTTLTVSS |
| 891 | DVD902L | AB112VL | AB039VL | DIVLTQSPTSLAVSLGQRATISCRASESVDTFGIS |
| | | | | FMNWFQQKPGQPPKLLIHAASNQGSGVPSRFSGSG |
| | | | | SGTDFSLNIHPMEEDDSAMYFCQQSKEVPFTFGSG |
| | | | | TKLEIKRTVAAPSVFIFPPQIVLTQSPAIMSASPG |
| | | | | EKVTMTCSASSSVSYMNWYQQKSGTSPKRWIYDTS |
| | | | | KLASGVPAHFRGSGSGTSYSLTISGMEAEDAATYY |
| | | | | CQQWSSNPFTFGSGTKLEINR |

### Example 2.196

### Generation of CD3 (Seq. 3) and CD-19 (Seq. 3) DVD-Igs with Linker Set 1

TABLE 249

| | DVD | Outer | Inner | |
|---|---|---|---|---|
| SEQ | Variable | Variable | Variable | |
| ID | Domain | Domain | Domain | Sequence |
| NO | Name | Name | Name | 12345678901234567890123456789012345 |
| 892 | DVD903H | AB107VH | AB112VH | EVQLVESGGGLVQPGGSLRLSCAASGYSFTGYTMN |
| | | | | WVRQAPGKGLEWVALINPYKGVSTYNQKFKDRFTI |
| | | | | SVDKSKNTAYLQMNSLRAEDTAVYYCARSGYYGDS |
| | | | | DWYFDVWGQGTLVTVSSASTKGPSVFPLAPEVQLQ |
| | | | | ESGPELVKPGASVKISCKASGYAFSSSWMNWVIQR |
| | | | | PGQGLEWIGRIYPGDGDTNYNGKFKGKATLTADKS |
| | | | | SSTAYMQLSSLTSVDSAVYFCARSGFITTVLDFDY |
| | | | | WGQGTTLTVSS |
| 893 | DVD903L | AB107VL | AB112VL | DIQMTQSPSSLSASVGDRVTITCRASQDIRNYLNW |
| | | | | YQQKPGKAPKLLIYYTSRLESGVPSRFSGSGSGTD |
| | | | | YTLTISSLQPEDFATYYCQQGNTLPWTFGQGTKVE |
| | | | | IKRTVAAPSVFIFPPDIVLTQSPTSLAVSLGQRAT |
| | | | | ISCRASESVDTFGISFMNWFQQKPGQPPKLLIHAA |
| | | | | SNQGSGVPSRFSGSGSGTDFSLNIHPMEEDDSAMY |
| | | | | FCQQSKEVPFTFGSGTKLEIKR |
| 894 | DVD904H | AB112VH | AB107VH | EVQLQESGPELVKPGASVKISCKASGYAFSSSWMN |
| | | | | WVIQRPGQGLEWIGRIYPGDGDTNYNGKFKGKATL |
| | | | | TADKSSSTAYMQLSSLTSVDSAVYFCARSGFITTV |
| | | | | LDFDYWGQGTTLTVSSASTKGPSVFPLAPEVQLVE |
| | | | | SGGGLVQPGGSLRLSCAASGYSFTGYTMNWVRQAP |
| | | | | GKGLEWVALINPYKGVSTYNQKFKDRFTISVDKSK |
| | | | | NTAYLQMNSLRAEDTAVYYCARSGYYGDSDWYFDV |
| | | | | WGQGTLVTVSS |
| 895 | DVD904L | AB112VL | AB107VL | DIVLTQSPTSLAVSLGQRATISCRASESVDTFGIS |
| | | | | FMNWFQQKPGQPPKLLIHAASNQGSGVPSRFSGSG |
| | | | | SGTDFSLNIHPMEEDDSAMYFCQQSKEVPFTFGSG |
| | | | | TKLEIKRTVAAPSVFIFPPDIQMTQSPSSLSASVG |
| | | | | DRVTITCRASQDIRNYLNWYQQKPGKAPKLLIYYT |
| | | | | SRLESGVPSRFSGSGSGTDYTLTISSLQPEDFATY |
| | | | | YCQQGNTLPWTFGQGTKVEIKR |

### Example 2.197

### Generation of CD3 (Seq. 2) and CD-19 (Seq. 1) DVD-Igs with Linker Set 1

TABLE 250

| | DVD | Outer | Inner | |
|---|---|---|---|---|
| SEQ | Variable | Variable | Variable | |
| ID | Domain | Domain | Domain | Sequence |
| NO | Name | Name | Name | 12345678901234567890123456789012345 |
| 896 | DVD913H | AB039VH | AB006VH | QVQLQQSGAELARPGASVKMSCKASGYTFTRYTMH |
| | | | | WVKQRPGQGLEWIGYINPSRGYTNYNQKFKDKATL |
| | | | | TTDKSSSTAYMQLSSLTSEDSAVYYCARYYDDHYC |
| | | | | LDYWGQGTTLTVSSASTKGPSVFPLAPQVQLQQSG |
| | | | | AELVRPGSSVKISCKASGYAFSSYWMNWVKQRPGQ |
| | | | | GLEWIGQIWPGDGDTNYNGKFKGKATLTADESSST |
| | | | | AYMQLSSLASEDSAVYFCARRETTTVGRYYYAMDY |
| | | | | WGQGTSVTVSS |
| 897 | DVD913L | AB039VL | AB006VL | QIVLTQSPAIMSASPGEKVTMTCSASSSVSYMNWY |
| | | | | QQKSGTSPKRWIYDTSKLASGVPAHFRGSGSGTSY |
| | | | | SLTISGMEAEDAATYYCQQWSSNPFTFGSGTKLEI |
| | | | | NRTVAAPSVFIFPPDILLTQTPASLAVSLGQRATI |
| | | | | SCKASQSVDYDGDSYLNWYQQIPGQPPKLLIYDAS |
| | | | | NLVSGIPPRFSGSGSGTDFTLNIHPVEKVDAATYH |
| | | | | CQQSTEDPWTFGGGTKLEIKR |
| 898 | DVD914H | AB006VH | AB039VH | QVQLQQSGAELVRPGSSVKISCKASGYAFSSYWMN |
| | | | | WVKQRPGQGLEWIGQIWPGDGDTNYNGKFKGKATL |
| | | | | TADESSSTAYMQLSSLASEDSAVYFCARRETTTVG |
| | | | | RYYYAMDYWGQGTSVTVSSASTKGPSVFPLAPQVQ |
| | | | | LQQSGAELARPGASVKMSCKASGYTFTRYTMHWVK |
| | | | | QRPGQGLEWIGYINPSRGYTNYNQKFKDKATLTTD |
| | | | | KSSSTAYMQLSSLTSEDSAVYYCARYYDDHYCLDY |
| | | | | WGQGTTLTVSS |
| 899 | DVD914L | AB006VL | AB039VL | DILLTQTPASLAVSLGQRATISCKASQSVDYDGDS |
| | | | | YLNWYQQIPGQPPKLLIYDASNLVSGIPPRFSGSG |
| | | | | SGTDFTLNIHPVEKVDAATYHCQQSTEDPWTFGGG |
| | | | | TKLEIKRTVAAPSVFIFPPQIVLTQSPAIMSASPG |
| | | | | EKVTMTCSASSSVSYMNWYQQKSGTSPKRWIYDTS |
| | | | | KLASGVPAHFRGSGSGTSYSLTISGMEAEDAATYY |
| | | | | CQQWSSNPFTFGSGTKLEINR |

[1000] Example 2.198

### Generation of CD3 (Seq. 3) and CD-19 (Seq. 1) DVD-Igs with Linker Set 1

TABLE 251

| | DVD | Outer | Inner | |
|---|---|---|---|---|
| SEQ | Variable | Variable | Variable | |
| ID | Domain | Domain | Domain | Sequence |
| NO | Name | Name | Name | 12345678901234567890123456789012345 |
| 900 | DVD915H | AB107VH | AB006VH | EVQLVESGGGLVQPGGSLRLSCAASGYSFTGYTMN |
| | | | | WVRQAPGKGLEWVALINPYKGVSTYNQKFKDRFTI |
| | | | | SVDKSKNTAYLQMNSLRAEDTAVYYCARSGYYGDS |
| | | | | DWYFDVWGQGTLVTVSSASTKGPSVFPLAPQVQLQ |
| | | | | QSGAELVRPGSSVKISCKASGYAFSSYWMNWVKQR |
| | | | | PGQGLEWIGQIWPGDGDTNYNGKFKGKATLTADES |
| | | | | SSTAYMQLSSLASEDSAVYFCARRETTTVGRYYYA |
| | | | | MDYWGQGTSVTVSS |
| 901 | DVD915L | AB107VL | AB006VL | DIQMTQSPSSLSASVGDRVTITCRASQDIRNYLNW |
| | | | | YQQKPGKAPKLLIYYTSRLESGVPSRFSGSGSGTD |
| | | | | YTLTISSLQPEDFATYYCQQGNTLPWTFGQGTKVE |
| | | | | IKRTVAAPSVFIFPPDILLTQTPASLAVSLGQRAT |
| | | | | ISCKASQSVDYDGDSYLNWYQQIPGQPPKLLIYDA |
| | | | | SNLVSGIPPRFSGSGSGTDFTLNIHPVEKVDAATY |
| | | | | HCQQSTEDPWTFGGGTKLEIKR |
| 902 | DVD916H | AB006VH | AB107VH | QVQLQQSGAELVRPGSSVKISCKASGYAFSSYWMN |
| | | | | WVKQRPGQGLEWIGQIWPGDGDTNYNGKFKGKATL |
| | | | | TADESSSTAYMQLSSLASEDSAVYFCARRETTTVG |
| | | | | RYYYAMDYWGQGTSVTVSSASTKGPSVFPLAPEVQ |
| | | | | LVESGGGLVQPGGSLRLSCAASGYSFTGYTMNWVR |
| | | | | QAPGKGLEWVALINPYKGVSTYNQKFKDRFTISVD |
| | | | | KSKNTAYLQMNSLRAEDTAVYYCARSGYYGDSDWY |
| | | | | FDVWGQGTLVTVSS |
| 903 | DVD916L | AB006VL | AB107VL | DILLTQTPASLAVSLGQRATISCKASQSVDYDGDS |
| | | | | YLNWYQQIPGQPPKLLIYDASNLVSGIPPRFSGSG |
| | | | | SGTDFTLNIHPVEKVDAATYHCQQSTEDPWTFGGG |
| | | | | TKLEIKRTVAAPSVFIFPPDIQMTQSPSSLSASVG |
| | | | | DRVTITCRASQDIRNYLNWYQQKPGKAPKLLIYYT |
| | | | | SRLESGVPSRFSGSGSGTDYTLTISSLQPEDFATY |
| | | | | YCQQGNTLPWTFGQGTKVEIKR |

[1002] Example 2.199

### Generation of CD3 (Seq. 4) and CD-19 (Seq. 2) DVD-Igs with Linker Set 1

TABLE 252

| | DVD | Outer | Inner | |
|---|---|---|---|---|
| SEQ | Variable | Variable | Variable | |
| ID | Domain | Domain | Domain | Sequence |
| NO | Name | Name | Name | 12345678901234567890123456789012345 |
| 904 | DVD917H | AB108VH | AB111VH | EVQLLESGGGLVQPGGSLKLSCAASGFTFNTYAMN |
| | | | | WVRQAPGKGLEWVARIRSKYNNYATYYADSVKDRF |
| | | | | TISRDDSKNTAYLQMNNLKTEDTAVYYCVRHGNFG |
| | | | | NSYVSWFAYWGQGTLVTVSSASTKGPSVFPLAPEV |
| | | | | KLQESGPGLVAPSQSLSVTCTVSGVSLPDYGVSWI |
| | | | | RQPPRKGLEWLGVIWGSEGTTYYNSALKSRLTIIK |
| | | | | DNSKSQVPLKMNSLQTDDTAIYYCAKHYYYGGSYA |
| | | | | MDYWGQGTSVTVSS |
| 905 | DVD917L | AB108VL | AB111VL | ELVVTQEPSLTVSPGGTVTLTCRSSTGAVTTSNYA |
| | | | | NWVQQKPGQAPRGLIGGTNKRAPGTPARFSGSLLG |
| | | | | GKAALTLSGVQPEDEAEYYCALWYSNLWVFGGGTK |
| | | | | LTVLGQPKAAPSVTLFPPDIQMTQTTSSLSASLGD |
| | | | | RVTISCRASQDISKTLNWYQQKPDGTVKLLIYHTS |
| | | | | RLHSGVPSRFSGSGSGTDYSLTISNLEQEDIATYF |
| | | | | CQQGNTLPYTFGGGTKLEITR |
| 906 | DVD918H | AB111VH | AB108VH | EVKLQESGPGLVAPSQSLSVTCTVSGVSLPDYGVS |
| | | | | WIRQPPRKGLEWLGVIWGSEGTTYYNSALKSRLTI |
| | | | | IKDNSKSQVPLKMNSLQTDDTAIYYCAKHYYYGGS |
| | | | | YAMDYWGQGTSVTVSSASTKGPSVFPLAPEVQLLE |
| | | | | SGGGLVQPGGSLKLSCAASGFTFNTYAMNWVRQAP |
| | | | | GKGLEWVARIRSKYNNYATYYADSVKDRFTISRDD |
| | | | | SKNTAYLQMNNLKTEDTAVYYCVRHGNFGNSYVSW |
| | | | | FAYWGQGTLVTVSS |
| 907 | DVD918L | AB111VL | AB108VL | DIQMTQTTSSLSASLGDRVTISCRASQDISKTLNW |
| | | | | YQQKPDGTVKLLIYHTSRLHSGVPSRFSGSGSGTD |
| | | | | YSLTISNLEQEDIATYFCQQGNTLPYTFGGGTKLE |
| | | | | ITRTVAAPSVFIFPPELVVTQEPSLTVSPGGTVTL |
| | | | | TCRSSTGAVTTSNYANWVQQKPGQAPRGLIGGTNK |
| | | | | RAPGTPARFSGSLLGGKAALTLSGVQPEDEAEYYC |
| | | | | ALWYSNLWVFGGGTKLTVLG |

[1004] Example 2.200

### Generation of CD3 (Seq. 4) and CD-19 (Seq. 3) DVD-Igs with Linker Set 1

TABLE 253

| | DVD | Outer | Inner | |
|---|---|---|---|---|
| SEQ | Variable | Variable | Variable | |
| ID | Domain | Domain | Domain | Sequence |
| NO | Name | Name | Name | 12345678901234567890123456789012345 |
| 908 | DVD919H | AB108VH | AB112VH | EVQLLESGGGLVQPGGSLKLSCAASGFTFNTYAMN |
| | | | | WVRQAPGKGLEWVARIRSKYNNYATYYADSVKDRF |
| | | | | TISRDDSKNTAYLQMNNLKTEDTAVYYCVRHGNFG |
| | | | | NSYVSWFAYWGQGTLVTVSSASTKGPSVFPLAPEV |
| | | | | QLQESGPELVKPGASVKISCKASGYAFSSSWMNWV |
| | | | | IQRPGQGLEWIGRIYPGDGDTNYNGKFKGKATLTA |
| | | | | DKSSSTAYMQLSSLTSVDSAVYFCARSGFITTVLD |
| | | | | FDYWGQGTTLTVSS |
| 909 | DVD919L | AB108VL | AB112VL | ELVVTQEPSLTVSPGGTVTLTCRSSTGAVTTSNYA |
| | | | | NWVQQKPGQAPRGLIGGTNKRAPGTPARFSGSLLG |
| | | | | GKAALTLSGVQPEDEAEYYCALWYSNLWVFGGGTK |
| | | | | LTVLGQPKAAPSVTLFPPDIVLTQSPTSLAVSLGQ |
| | | | | RATISCRASESVDTFGISFMNWFQQKPGQPPKLLI |
| | | | | HAASNQGSGVPSRFSGSGSGTDFSLNIHPMEEDDS |
| | | | | AMYFCQQSKEVPFTFGSGTKLEIKR |
| 910 | DVD920H | AB112VH | AB108VH | EVQLQESGPELVKPGASVKISCKASGYAFSSSWMN |
| | | | | WVIQRPGQGLEWIGRIYPGDGDTNYNGKFKGKATL |
| | | | | TADKSSSTAYMQLSSLTSVDSAVYFCARSGFITTV |
| | | | | LDFDYWGQGTTLTVSSASTKGPSVFPLAPEVQLLE |
| | | | | SGGGLVQPGGSLKLSCAASGFTFNTYAMNWVRQAP |
| | | | | GKGLEWVARIRSKYNNYATYYADSVKDRFTISRDD |
| | | | | SKNTAYLQMNNLKTEDTAVYYCVRHGNFGNSYVSW |
| | | | | FAYWGQGTLVTVSS |
| 911 | DVD920L | AB112VL | AB108VL | DIVLTQSPTSLAVSLGQRATISCRASESVDTFGIS |
| | | | | FMNWFQQKPGQPPKLLIHAASNQGSGVPSRFSGSG |
| | | | | SGTDFSLNIHPMEEDDSAMYFCQQSKEVPFTFGSG |
| | | | | TKLEIKRTVAAPSVFIFPPELVVTQEPSLTVSPGG |
| | | | | TVTLTCRSSTGAVTTSNYANWVQQKPGQAPRGLIG |
| | | | | GTNKRAPGTPARFSGSLLGGKAALTLSGVQPEDEA |
| | | | | EYYCALWYSNLWVFGGGTKLTVLG |

[1006] Example 2.201

### Generation of CD3 (Seq. 4) and CD-19 (Seq. 1) DVD-Igs with Linker Set 1

TABLE 254

| | DVD | Outer | Inner | |
|---|---|---|---|---|
| SEQ | Variable | Variable | Variable | |
| ID | Domain | Domain | Domain | Sequence |
| NO | Name | Name | Name | 12345678901234567890123456789012345 |
| 912 | DVD921H | AB108VH | AB006VH | EVQLLESGGGLVQPGGSLKLSCAASGFTFNTYAMN |
| | | | | WVRQAPGKGLEWVARIRSKYNNYATYYADSVKDRF |
| | | | | TISRDDSKNTAYLQMNNLKTEDTAVYYCVRHGNFG |
| | | | | NSYVSWFAYWGQGTLVTVSSASTKGPSVFPLAPQV |
| | | | | QLQQSGAELVRPGSSVKISCKASGYAFSSYWMNWV |
| | | | | KQRPGQGLEWIGQIWPGDGDTNYNGKFKGKATLTA |
| | | | | DESSSTAYMQLSSLASEDSAVYFCARRETTTVGRY |
| | | | | YYAMDYWGQGTSVTVSS |
| 913 | DVD921L | AB108VL | AB006VL | ELVVTQEPSLTVSPGGTVTLTCRSSTGAVTTSNYA |
| | | | | NWVQQKPGQAPRGLIGGTNKRAPGTPARFSGSLLG |
| | | | | GKAALTLSGVQPEDEAEYYCALWYSNLWVFGGGTK |
| | | | | LTVLGQPKAAPSVTLFPPDILLTQTPASLAVSLGQ |
| | | | | RATISCKASQSVDYDGDSYLNWYQQIPGQPPKLLI |
| | | | | YDASNLVSGIPPRFSGSGSGTDFTLNIHPVEKVDA |
| | | | | ATYHCQQSTEDPWTFGGGTKLEIKR |
| 914 | DVD922H | AB006VH | AB108VH | QVQLQQSGAELVRPGSSVKISCKASGYAFSSYWMN |
| | | | | WVKQRPGQGLEWIGQIWPGDGDTNYNGKFKGKATL |
| | | | | TADESSSTAYMQLSSLASEDSAVYFCARRETTTVG |
| | | | | RYYYAMDYWGQGTSVTVSSASTKGPSVFPLAPEVQ |
| | | | | LLESGGGLVQPGGSLKLSCAASGFTFNTYAMNWVR |
| | | | | QAPGKGLEWVARIRSKYNNYATYYADSVKDRFTIS |
| | | | | RDDSKNTAYLQMNNLKTEDTAVYYCVRHGNFGNSY |
| | | | | VSWFAYWGQGTLVTVSS |
| 915 | DVD922L | AB006VL | AB108VL | DILLTQTPASLAVSLGQRATISCKASQSVDYDGDS |
| | | | | YLNWYQQIPGQPPKLLIYDASNLVSGIPPRFSGSG |
| | | | | SGTDFTLNIHPVEKVDAATYHCQQSTEDPWTFGGG |
| | | | | TKLEIKRTVAAPSVFIFPPELVVTQEPSLTVSPGG |
| | | | | TVTLTCRSSTGAVTTSNYANWVQQKPGQAPRGLIG |
| | | | | GTNKRAPGTPARFSGSLLGGKAALTLSGVQPEDEA |
| | | | | EYYCALWYSNLWVFGGGTKLTVLG |

### Example 2.202

### Generation of CD3 (Seq. 4) and CD-19 (Seq. 1) DVD-Igs with Linker Set 2

TABLE 255

| | DVD | Outer | Inner | |
|---|---|---|---|---|
| SEQ | Variable | Variable | Variable | |
| ID | Domain | Domain | Domain | Sequence |
| NO | Name | Name | Name | 12345678901234567890123456789012345 |
| 916 | DVD1000H | AB006VH | AB108VH | QVQLQQSGAELVRPGSSVKISCKASGYAFSSYWMN |
| | | | | WVKQRPGQGLEWIGQIWPGDGDTNYNGKFKGKATL |
| | | | | TADESSSTAYMQLSSLASEDSAVYFCARRETTTVG |
| | | | | RYYYAMDYWGQGTSVTVSSASTKGPEVQLLESGGG |
| | | | | LVQPGGSLKLSCAASGFTFNTYAMNWVRQAPGKGL |
| | | | | EWVARIRSKYNNYATYYADSVKDRFTISRDDSKNT |
| | | | | AYLQMNNLKTEDTAVYYCVRHGNFGNSYVSWFAYW |
| | | | | GQGTLVTVSS |
| 917 | DVD1000L | AB006VL | AB108VL | DILLTQTPASLAVSLGQRATISCKASQSVDYDGDS |
| | | | | YLNWYQQIPGQPPKLLIYDASNLVSGIPPRFSGSG |
| | | | | SGTDFTLNIHPVEKVDAATYHCQQSTEDPWTFGGG |
| | | | | TKLEIKRTVAAPELVVTQEPSLTVSPGGTVTLTCR |
| | | | | SSTGAVTTSNYANWVQQKPGQAPRGLIGGTNKRAP |
| | | | | GTPARFSGSLLGGKAALTLSGVQPEDEAEYYCALW |
| | | | | YSNLWVFGGGTKLTVLG |

[1009] Example 2.203

### Generation of CD3 (Seq. 2) and CD-19 (Seq. 2) DVD-Igs with Linker Set 2

TABLE 256

| | DVD | Outer | Inner | |
|---|---|---|---|---|
| SEQ | Variable | Variable | Variable | |
| ID | Domain | Domain | Domain | Sequence |
| NO | Name | Name | Name | 12345678901234567890123456789012345 |
| 918 | DVD1005H | AB039VH | AB111VH | QVQLQQSGAELARPGASVKMSCKASGYTFTRYTMH |
| | | | | WVKQRPGQGLEWIGYINPSRGYTNYNQKFKDKATL |
| | | | | TTDKSSSTAYMQLSSLTSEDSAVYYCARYYDDHYC |
| | | | | LDYWGQGTTLTVSSASTKGPEVKLQESGPGLVAPS |
| | | | | QSLSVTCTVSGVSLPDYGVSWIRQPPRKGLEWLGV |
| | | | | IWGSEGTTYYNSALKSRLTIIKDNSKSQVPLKMNS |
| | | | | LQTDDTAIYYCAKHYYYGGSYAMDYWGQGTSVTVS |
| | | | | S |
| 919 | DVD1005L | AB039VL | AB111VL | QIVLTQSPAIMSASPGEKVTMTCSASSSVSYMNWY |
| | | | | QQKSGTSPKRWIYDTSKLASGVPAHFRGSGSGTSY |
| | | | | SLTISGMEAEDAATYYCQQWSSNPFTFGSGTKLEI |
| | | | | NRTVAAPDIQMTQTTSSLSASLGDRVTISCRASQD |
| | | | | ISKTLNWYQQKPDGTVKLLIYHTSRLHSGVPSRFS |
| | | | | GSGSGTDYSLTISNLEQEDIATYFCQQGNTLPYTF |
| | | | | GGGTKLEITR |
| 920 | DVD1006H | AB111VH | AB039VH | EVKLQESGPGLVAPSQSLSVTCTVSGVSLPDYGVS |
| | | | | WIRQPPRKGLEWLGVIWGSEGTTYYNSALKSRLTI |
| | | | | IKDNSKSQVPLKMNSLQTDDTAIYYCAKHYYYGGS |
| | | | | YAMDYWGQGTSVTVSSASTKGPQVQLQQSGAELAR |
| | | | | PGASVKMSCKASGYTFTRYTMHWVKQRPGQGLEWI |
| | | | | GYINPSRGYTNYNQKFKDKATLTTDKSSSTAYMQL |
| | | | | SSLTSEDSAVYYCARYYDDHYCLDYWGQGTTLTVS |
| | | | | S |
| 921 | DVD1006L | AB111VL | AB039VL | DIQMTQTTSSLSASLGDRVTISCRASQDISKTLNW |
| | | | | YQQKPDGTVKLLIYHTSRLHSGVPSRFSGSGSGTD |
| | | | | YSLTISNLEQEDIATYFCQQGNTLPYTFGGGTKLE |
| | | | | ITRTVAAPQIVLTQSPAIMSASPGEKVTMTCSASS |
| | | | | SVSYMNWYQQKSGTSPKRWIYDTSKLASGVPAHFR |
| | | | | GSGSGTSYSLTISGMEAEDAATYYCQQWSSNPFTF |
| | | | | GSGTKLEINR |

[1011] Example 2.204

### Generation of mCD3 and mCD-19 DVD-Igs with Linker Set 1

TABLE 257

| | DVD | Outer | Inner | |
|---|---|---|---|---|
| SEQ | Variable | Variable | Variable | |
| ID | Domain | Domain | Domain | Sequence |
| NO | Name | Name | Name | 12345678901234567890123456789012345 |
| 922 | DVD1044H | AB110VH | AB114VH | EVQLVESGGGLVQPGKSLKLSCEASGFTFSGYGMH |
| | | | | WVRQAPGRGLESVAYITSSSINIKYADAVKGRFTV |
| | | | | SRDNAKNLLFLQMNILKSEDTAMYYCARFDWDKNY |
| | | | | WGQGTMVTVSSASTKGPEVQLQQSGAELVRPGTSV |
| | | | | KLSCKVSGDTITFYYMHFVKQRPGQGLEWIGRIDP |
| | | | | EDESTKYSEKFKNKATLTADTSSNTAYLKLSSLTS |
| | | | | EDTATYFCIYGGYYFDYWGQGVMVTVSS |
| 923 | DVD1044L | AB110VL | AB114VL | DIQMTQSPSSLPASLGDRVTINCQASQDISNYLNW |
| | | | | YQQKPGKAPKLLIYYTNKLADGVPSRFSGSGSGRD |
| | | | | SSFTISSLESEDIGSYYCQQYYNYPWTFGPGTKLE |
| | | | | IKRTVAAPDIQMTQSPASLSTSLGETVTIQCQASE |
| | | | | DIYSGLAWYQQKPGKSPQLLIYGASDLQDGVPSRF |
| | | | | SGSGSGTQYSLKITSMQTEDEGVYFCQQGLTYPRT |
| | | | | FGGGTKLELKR |
| 924 | DVD1045H | AB114VH | AB110VH | EVQLQQSGAELVRPGTSVKLSCKVSGDTITFYYMH |
| | | | | FVKQRPGQGLEWIGRIDPEDESTKYSEKFKNKATL |
| | | | | TADTSSNTAYLKLSSLTSEDTATYFCIYGGYYFDY |
| | | | | WGQGVMVTVSSASTKGPEVQLVESGGGLVQPGKSL |
| | | | | KLSCEASGFTFSGYGMHWVRQAPGRGLESVAYITS |
| | | | | SSINIKYADAVKGRFTVSRDNAKNLLFLQMNILKS |
| | | | | EDTAMYYCARFDWDKNYWGQGTMVTVSS |
| 925 | DVD1045L | AB114VL | AB110VL | DIQMTQSPASLSTSLGETVTIQCQASEDIYSGLAW |
| | | | | YQQKPGKSPQLLIYGASDLQDGVPSRFSGSGSGTQ |
| | | | | YSLKITSMQTEDEGVYFCQQGLTYPRTFGGGTKLE |
| | | | | LKRTVAAPDIQMTQSPSSLPASLGDRVTINCQASQ |
| | | | | DISNYLNWYQQKPGKAPKLLIYYTNKLADGVPSRF |
| | | | | SGSGSGRDSSFTISSLESEDIGSYYCQQYYNYPWT |
| | | | | FGPGTKLEIKR |

[1013] Example 2.205

### Generation of mCD3 and mCD-19 DVD-Igs with Linker Set 2

TABLE 258

| | DVD | Outer | Inner | |
|---|---|---|---|---|
| SEQ | Variable | Variable | Variable | |
| ID | Domain | Domain | Domain | Sequence |
| NO | Name | Name | Name | 12345678901234567890123456789012345 |
| 926 | DVD1046H | AB110VH | AB114VH | EVQLVESGGGLVQPGKSLKLSCEASGFTESGYGMH |
| | | | | WVRQAPGRGLESVAYITSSSINIKYADAVKGRFTV |
| | | | | SRDNAKNLLFLQMNILKSEDTAMYYCARFDWDKNY |
| | | | | WGQGTMVTVSSASTKGPSVFPLAPEVQLQQSGAEL |
| | | | | VRPGTSVKLSCKVSGDTITFYYMHFVKQRPGQGLE |
| | | | | WIGRIDPEDESTKYSEKFKNKATLTADTSSNTAYL |
| | | | | KLSSLTSEDTATYFCIYGGYYFDYWGQGVMVTVSS |
| 927 | DVD1046L | AB110VL | AB114VL | DIQMTQSPSSLPASLGDRVTINCQASQDISNYLNW |
| | | | | YQQKPGKAPKLLIYYTNKLADGVPSRFSGSGSGRD |
| | | | | SSFTISSLESEDIGSYYCQQYYNYPWTFGPGTKLE |
| | | | | IKRTVAAPSVFIFPPDIQMTQSPASLSTSLGETVT |
| | | | | IQCQASEDIYSGLAWYQQKPGKSPQLLIYGASDLQ |
| | | | | DGVPSRFSGSGSGTQYSLKITSMQTEDEGVYFCQQ |
| | | | | GLTYPRTFGGGTKLELKR |
| 928 | DVD1047H | AB114VH | AB110VH | EVQLQQSGAELVRPGTSVKLSCKVSGDTITFYYMH |
| | | | | FVKQRPGQGLEWIGRIDPEDESTKYSEKFKNKATL |
| | | | | TADTSSNTAYLKLSSLTSEDTATYFCIYGGYYFDY |
| | | | | WGQGVMVTVSSASTKGPSVFPLAPEVQLVESGGGL |
| | | | | VQPGKSLKLSCEASGFTFSGYGMHWVRQAPGRGLE |
| | | | | SVAYITSSSINIKYADAVKGRFTVSRDNAKNLLFL |
| | | | | QMNILKSEDTAMYYCARFDWDKNYWGQGTMVTVSS |
| 929 | DVD1047L | AB114VL | AB110VL | DIQMTQSPASLSTSLGETVTIQCQASEDIYSGLAW |
| | | | | YQQKPGKSPQLLIYGASDLQDGVPSRFSGSGSGTQ |
| | | | | YSLKITSMQTEDEGVYFCQQGLTYPRTFGGGTKLE |
| | | | | LKRTVAAPSVFIFPPDIQMTQSPSSLPASLGDRVT |
| | | | | INCQASQDISNYLNWYQQKPGKAPKLLIYYTNKLA |
| | | | | DGVPSRFSGSGSGRDSSFTISSLESEDIGSYYCQQ |
| | | | | YYNYPWTFGPGTKLEIKR |

### Example 2.206

### Cloning Vector Sequences Used to Clone Parent Antibody and DVD-Ig Sequences

TABLE 259

| Vector | | Nucleotide sequences |
|---|---|---|
| name | SEQ ID NO | 123456789012345678901234567890123456789012345678901 |
| V1 | 930 | GCGTCGACCAAGGGCCCATCGGTCTTCCCCCTGGCACCCTCCTCCAAGAGC |
| | | ACCTCTGGGGGCACAGCGGCCCTGGGCTGCCTGGTCAAGGACTACTTCCCC |
| | | GAACCGGTGACGGTGTCGTGGAACTCAGGCGCCCTGACCAGCGGCGTGCAC |
| | | ACCTTCCCGGCTGTCCTACAGTCCTCAGGACTCTACTCCCTCAGCAGCGTG |
| | | GTGACCGTGCCCTCCAGCAGCTTGGGCACCCAGACCTACATCTGCAACGTG |
| | | AATCACAAGCCCAGCAACACCAAGGTGGACAAGAAAGTTGAGCCCAAATCT |
| | | TGTGACAAAACTCACACATGCCCACCGTGCCCAGCACCTGAACTCCTGGGG |
| | | GGACCGTCAGTCTTCCTCTTCCCCCCAAAACCCAAGGACACCCTCATGATC |
| | | TCCCGGACCCCTGAGGTCACATGCGTGGTGGTGGACGTGAGCCACGAAGAC |
| | | CCTGAGGTCAAGTTCAACTGGTACGTGGACGGCGTGGAGGTGCATAATGCC |
| | | AAGACAAAGCCGCGGGAGGAGCAGTACAACAGCACGTACCGTGTGGTCAGC |
| | | GTCCTCACCGTCCTGCACCAGGACTGGCTGAATGGCAAGGAGTACAAGTGC |
| | | AAGGTCTCCAACAAAGCCCTCCCAGCCCCCATCGAGAAAACCATCTCCAAA |
| | | GCCAAAGGGCAGCCCCGAGAACCACAGGTGTACACCCTGCCCCCATCCCGC |
| | | GAGGAGATGACCAAGAACCAGGTCAGCCTGACCTGCCTGGTCAAAGGCTTC |
| | | TATCCCAGCGACATCGCCGTGGAGTGGGAGAGCAATGGGCAGCCGGAGAAC |
| | | AACTACAAGACCACGCCTCCCGTGCTGGACTCCGACGGCTCCTTCTTCCTC |
| | | TACAGCAAGCTCACCGTGGACAAGAGCAGGTGGCAGCAGGGGAACGTCTTC |
| | | TCATGCTCCGTGATGCATGAGGCTCTGCACAACCACTACACGCAGAAGAGC |
| | | CTCTCCCTGTCTCCGGGTAAATGAGCGGCCGCTCGAGGCCGGCAAGGCCGG |
| | | ATCCCCCGACCTCGACCTCTGGCTAATAAAGGAAATTTATTTTCATTGCAA |
| | | TAGTGTGTTGGAATTTTTTGTGTCTCTCACTCGGAAGGACATATGGGAGGG |
| | | CAAATCATTTGGTCGAGATCCCTCGGAGATCTCTAGCTAGAGGATCGATCC |
| | | CCGCCCCGGACGAACTAAACCTGACTACGACATCTCTGCCCCTTCTTCGCG |
| | | GGGCAGTGCATGTAATCCCTTCAGTTGGTTGGTACAACTTGCCAACTGGGC |
| | | CCTGTTCCACATGTGACACGGGGGGGGACCAAACACAAAGGGGTTCTCTGA |
| | | CTGTAGTTGACATCCTTATAAATGGATGTGCACATTTGCCAACACTGAGTG |
| | | GCTTTCATCCTGGAGCAGACTTTGCAGTCTGTGGACTGCAACACAACATTG |
| | | CCTTTATGTGTAACTCTTGGCTGAAGCTCTTACACCAATGCTGGGGGACAT |
| | | GTACCTCCCAGGGGCCCAGGAAGACTACGGGAGGCTACACCAACGTCAATC |
| | | AGAGGGGCCTGTGTAGCTACCGATAAGCGGACCCTCAAGAGGGCATTAGCA |
| | | ATAGTGTTTATAAGGCCCCCTTGTTAACCCTAAACGGGTAGCATATGCTTC |
| | | CCGGGTAGTAGTATATACTATCCAGACTAACCCTAATTCAATAGCATATGT |
| | | TACCCAACGGGAAGCATATGCTATCGAATTAGGGTTAGTAAAAGGGTCCTA |
| | | AGGAACAGCGATATCTCCCACCCCATGAGCTGTCACGGTTTTATTTACATG |
| | | GGGTCAGGATTCCACGAGGGTAGTGAACCATTTTAGTCACAAGGGCAGTGG |
| | | CTGAAGATCAAGGAGCGGGCAGTGAACTCTCCTGAATCTTCGCCTGCTTCT |
| | | TCATTCTCCTTCGTTTAGCTAATAGAATAACTGCTGAGTTGTGAACAGTAA |
| | | GGTGTATGTGAGGTGCTCGAAAACAAGGTTTCAGGTGACGCCCCCAGAATA |
| | | AAATTTGGACGGGGGGTTCAGTGGTGGCATTGTGCTATGACACCAATATAA |
| | | CCCTCACAAACCCCTTGGGCAATAAATACTAGTGTAGGAATGAAACATTCT |
| | | GAATATCTTTAACAATAGAAATCCATGGGGTGGGGACAAGCCGTAAAGACT |
| | | GGATGTCCATCTCACACGAATTTATGGCTATGGGCAACACATAATCCTAGT |
| | | GCAATATGATACTGGGGTTATTAAGATGTGTCCCAGGCAGGGACCAAGACA |
| | | GGTGAACCATGTTGTTACACTCTATTTGTAACAAGGGGAAAGAGAGTGGAC |
| | | GCCGACAGCAGCGGACTCCACTGGTTGTCTCTAACACCCCCGAAAATTAAA |
| | | CGGGGCTCCACGCCAATGGGGCCCATAAACAAAGACAAGTGGCCACTCTTT |
| | | TTTTTGAAATTGTGGAGTGGGGGCACGCGTCAGCCCCCACACGCCGCCCTG |
| | | CGGTTTTGGACTGTAAAATAAGGGTGTAATAACTTGGCTGATTGTAACCCC |
| | | GCTAACCACTGCGGTCAAACCACTTGCCCACAAAACCACTAATGGCACCCC |
| | | GGGGAATACCTGCATAAGTAGGTGGGCGGGCCAAGATAGGGGCGCGATTGC |
| | | TGCGATCTGGAGGACAAATTACACACACTTGCGCCTGAGCGCCAAGCACAG |
| | | GGTTGTTGGTCCTCATATTCACGAGGTCGCTGAGAGCACGGTGGGCTAATG |
| | | TTGCCATGGGTAGCATATACTACCCAAATATCTGGATAGCATATGCTATCC |
| | | TAATCTATATCTGGGTAGCATAGGCTATCCTAATCTATATCTGGGTAGCAT |
| | | ATGCTATCCTAATCTATATCTGGGTAGTATATGCTATCCTAATTTATATCT |
| | | GGGTAGCATAGGCTATCCTAATCTATATCTGGGTAGCATATGCTATCCTAA |
| | | TCTATATCTGGGTAGTATATGCTATCCTAATCTGTATCCGGGTAGCATATG |
| | | CTATCCTAATAGAGATTAGGGTAGTATATGCTATCCTAATTTATATCTGGG |
| | | TAGCATATACTACCCAAATATCTGGATAGCATATGCTATCCTAATCTATAT |
| | | CTGGGTAGCATATGCTATCCTAATCTATATCTGGGTAGCATAGGCTATCCT |
| | | AATCTATATCTGGGTAGCATATGCTATCCTAATCTATATCTGGGTAGTATA |
| | | TGCTATCCTAATTTATATCTGGGTAGCATAGGCTATCCTAATCTATATCTG |
| | | GGTAGCATATGCTATCCTAATCTATATCTGGGTAGTATATGCTATCCTAAT |
| | | CTGTATCCGGGTAGCATATGCTATCCTCATGATAAGCTGTCAAACATGAGA |
| | | ATTTTCTTGAAGACGAAAGGGCCTCGTGATACGCCTATTTTTATAGGTTAA |
| | | TGTCATGATAATAATGGTTTCTTAGACGTCAGGTGGCACTTTTCGGGGAAA |
| | | TGTGCGCGGAACCCCTATTTGTTTATTTTTCTAAATACATTCAAATATGTA |
| | | TCCGCTCATGAGACAATAACCCTGATAAATGCTTCAATAATATTGAAAAAG |
| | | GAAGAGTATGAGTATTCAACATTTCCGTGTCGCCCTTATTCCCTTTTTTGC |
| | | GGCATTTTGCCTTCCTGTTTTTGCTCACCCAGAAACGCTGGTGAAAGTAAA |
| | | AGATGCTGAAGATCAGTTGGGTGCACGAGTGGGTTACATCGAACTGGATCT |
| | | CAACAGCGGTAAGATCCTTGAGAGTTTTCGCCCCGAAGAACGTTTTCCAAT |
| | | GATGAGCACTTTTAAAGTTCTGCTATGTGGCGCGGTATTATCCCGTGTTGA |
| | | CGCCGGGCAAGAGCAACTCGGTCGCCGCATACACTATTCTCAGAATGACTT |
| | | GGTTGAGTACTCACCAGTCACAGAAAAGCATCTTACGGATGGCATGACAGT |
| | | AAGAGAATTATGCAGTGCTGCCATAACCATGAGTGATAACACTGCGGCCAA |
| | | CTTACTTCTGACAACGATCGGAGGACCGAAGGAGCTAACCGCTTTTTTGCA |
| | | CAACATGGGGGATCATGTAACTCGCCTTGATCGTTGGGAACCGGAGCTGAA |
| | | TGAAGCCATACCAAACGACGAGCGTGACACCACGATGCCTGCAGCAATGGC |
| | | AACAACGTTGCGCAAACTATTAACTGGCGAACTACTTACTCTAGCTTCCCG |
| | | GCAACAATTAATAGACTGGATGGAGGCGGATAAAGTTGCAGGACCACTTCT |
| | | GCGCTCGGCCCTTCCGGCTGGCTGGTTTATTGCTGATAAATCTGGAGCCGG |
| | | TGAGCGTGGGTCTCGCGGTATCATTGCAGCACTGGGGCCAGATGGTAAGCC |
| | | CTCCCGTATCGTAGTTATCTACACGACGGGGAGTCAGGCAACTATGGATGA |
| | | ACGAAATAGACAGATCGCTGAGATAGGTGCCTCACTGATTAAGCATTGGTA |
| | | ACTGTCAGACCAAGTTTACTCATATATACTTTAGATTGATTTAAAACTTCA |
| | | TTTTTAATTTAAAAGGATCTAGGTGAAGATCCTTTTTGATAATCTCATGAC |
| | | CAAAATCCCTTAACGTGAGTTTTCGTTCCACTGAGCGTCAGACCCCGTAGA |
| | | AAAGATCAAAGGATCTTCTTGAGATCCTTTTTTTCTGCGCGTAATCTGCTG |
| | | CTTGCAAACAAAAAAACCACCGCTACCAGCGGTGGTTTGTTTGCCGGATCA |
| | | AGAGCTACCAACTCTTTTTCCGAAGGTAACTGGCTTCAGCAGAGCGCAGAT |
| | | ACCAAATACTGTTCTTCTAGTGTAGCCGTAGTTAGGCCACCACTTCAAGAA |
| | | CTCTGTAGCACCGCCTACATACCTCGCTCTGCTAATCCTGTTACCAGTGGC |
| | | TGCTGCCAGTGGCGATAAGTCGTGTCTTACCGGGTTGGACTCAAGACGATA |
| | | GTTACCGGATAAGGCGCAGCGGTCGGGCTGAACGGGGGGTTCGTGCACACA |
| | | GCCCAGCTTGGAGCGAACGACCTACACCGAACTGAGATACCTACAGCGTGA |
| | | GCTATGAGAAAGCGCCACGCTTCCCGAAGGGAGAAAGGCGGACAGGTATCC |
| | | GGTAAGCGGCAGGGTCGGAACAGGAGAGCGCACGAGGGAGCTTCCAGGGGG |
| | | AAACGCCTGGTATCTTTATAGTCCTGTCGGGTTTCGCCACCTCTGACTTGA |
| | | GCGTCGATTTTTGTGATGCTCGTCAGGGGGGCGGAGCCTATGGAAAAACGC |
| | | CAGCAACGCGGCCTTTTTACGGTTCCTGGCCTTTTGCTGGCCTTTTGCTCA |
| | | CATGTTCTTTCCTGCGTTATCCCCTGATTCTGTGGATAACCGTATTACCGC |
| | | CTTTGAGTGAGCTGATACCGCTCGCCGCAGCCGAACGACCGAGCGCAGCGA |
| | | GTCAGTGAGCGAGGAAGCGGAAGAGCGCCCAATACGCAAACCGCCTCTCCC |
| | | CGCGCGTTGGCCGATTCATTAATGCAGCTGGCACGACAGGTTTCCCGACTG |
| | | GAAAGCGGGCAGTGAGCGCAACGCAATTAATGTGAGTTAGCTCACTCATTA |
| | | GGCACCCCAGGCTTTACACTTTATGCTTCCGGCTCGTATGTTGTGTGGAAT |
| | | TGTGAGCGGATAACAATTTCACACAGGAAACAGCTATGACCATGATTACGC |
| | | CAAGCTCTAGCTAGAGGTCGAGTCCCTCCCCAGCAGGCAGAAGTATGCAAA |
| | | GCATGCATCTCAATTAGTCAGCAACCATAGTCCCGCCCCTAACTCCGCCCA |
| | | TCCCGCCCCTAACTCCGCCCAGTTCCGCCCATTCTCCGCCCCATGGCTGAC |
| | | TAATTTTTTTTATTTATGCAGAGGCCGAGGCCGCCTCGGCCTCTGAGCTAT |
| | | TCCAGAAGTAGTGAGGAGGCTTTTTTGGAGGCCTAGGCTTTTGCAAAAAGC |
| | | TTTGCAAAGATGGATAAAGTTTTAAACAGAGAGGAATCTTTGCAGCTAATG |
| | | GACCTTCTAGGTCTTGAAAGGAGTGGGAATTGGCTCCGGTGCCCGTCAGTG |
| | | GGCAGAGCGCACATCGCCCACAGTCCCCGAGAAGTTGGGGGGAGGGGTCGG |
| | | CAATTGAACCGGTGCCTAGAGAAGGTGGCGCGGGGTAAACTGGGAAAGTGA |
| | | TGTCGTGTACTGGCTCCGCCTTTTTCCCGAGGGTGGGGGAGAACCGTATAT |
| | | AAGTGCAGTAGTCGCCGTGAACGTTCTTTTTCGCAACGGGTTTGCCGCCAG |
| | | AACACAGGTAAGTGCCGTGTGTGGTTCCCGCGGGCCTGGCCTCTTTACGGG |
| | | TTATGGCCCTTGCGTGCCTTGAATTACTTCCACCTGGCTGCAGTACGTGAT |
| | | TCTTGATCCCGAGCTTCGGGTTGGAAGTGGGTGGGAGAGTTCGAGGCCTTG |
| | | CGCTTAAGGAGCCCCTTCGCCTCGTGCTTGAGTTGAGGCCTGGCCTGGGCG |
| | | CTGGGGCCGCCGCGTGCGAATCTGGTGGCACCTTCGCGCCTGTCTCGCTGC |
| | | TTTCGATAAGTCTCTAGCCATTTAAAATTTTTGATGACCTGCTGCGACGCT |
| | | TTTTTTCTGGCAAGATAGTCTTGTAAATGCGGGCCAAGATCTGCACACTGG |
| | | TATTTCGGTTTTTGGGGCCGCGGGCGGCGACGGGGCCCGTGCGTCCCAGCG |
| | | CACATGTTCGGCGAGGCGGGGCCTGCGAGCGCGGCCACCGAGAATCGGACG |
| | | GGGGTAGTCTCAAGCTGGCCGGCCTGCTCTGGTGCCTGGCCTCGCGCCGCC |
| | | GTGTATCGCCCCGCCCTGGGCGGCAAGGCTGGCCCGGTCGGCACCAGTTGC |
| | | GTGAGCGGAAAGATGGCCGCTTCCCGGCCCTGCTGCAGGGAGCTCAAAATG |
| | | GAGGACGCGGCGCTCGGGAGAGCGGGCGGGTGAGTCACCCACACAAAGGAA |
| | | AAGGGCCTTTCCGTCCTCAGCCGTCGCTTCATGTGACTCCACGGAGTACCG |
| | | GGCGCCGTCCAGGCACCTCGATTAGTTCTCGAGCTTTTGGAGTACGTCGTC |
| | | TTTAGGTTGGGGGGAGGGGTTTTATGCGATGGAGTTTCCCCACACTGAGTG |
| | | GGTGGAGACTGAAGTTAGGCCAGCTTGGCACTTGATGTAATTCTCCTTGGA |
| | | ATTTGCCCTTTTTGAGTTTGGATCTTGGTTCATTCTCAAGCCTCAGACAGT |
| | | GGTTCAAAGTTTTTTTCTTCCATTTCAGGTGTCGTGAGGAATTCTCTAGAG |
| | | ATCCCTCGACCTCGAGATCCATTGTGCCCGGGCGCCACCATGGAGTTTGGG |
| | | CTGAGCTGGCTTTTTCTTGTCGCGATTTTAAAAGGTGTCCAGTGC |
| V2 | 931 | ACGGTGGCTGCACCATCTGTCTTCATCTTCCCGCCATCTGATGAGCAGTTG |
| | | AAATCTGGAACTGCCTCTGTTGTGTGCCTGCTGAATAACTTCTATCCCAGA |
| | | GAGGCCAAAGTACAGTGGAAGGTGGATAACGCCCTCCAATCGGGTAACTCC |
| | | CAGGAGAGTGTCACAGAGCAGGACAGCAAGGACAGCACCTACAGCCTCAGC |
| | | AGCACCCTGACGCTGAGCAAAGCAGACTACGAGAAACACAAAGTCTACGCC |
| | | TGCGAAGTCACCCATCAGGGCCTGAGCTCGCCCGTCACAAAGAGCTTCAAC |
| | | AGGGGAGAGTGTTGAGCGGCCGCTCGAGGCCGGCAAGGCCGGATCCCCCGA |
| | | CCTCGACCTCTGGCTAATAAAGGAAATTTATTTTCATTGCAATAGTGTGTT |
| | | GGAATTTTTTGTGTCTCTCACTCGGAAGGACATATGGGAGGGCAAATCATT |
| | | TGGTCGAGATCCCTCGGAGATCTCTAGCTAGAGGATCGATCCCCGCCCCGG |
| | | ACGAACTAAACCTGACTACGACATCTCTGCCCCTTCTTCGCGGGGCAGTGC |
| | | ATGTAATCCCTTCAGTTGGTTGGTACAACTTGCCAACTGGGCCCTGTTCCA |
| | | CATGTGACACGGGGGGGGACCAAACACAAAGGGGTTCTCTGACTGTAGTTG |
| | | ACATCCTTATAAATGGATGTGCACATTTGCCAACACTGAGTGGCTTTCATC |
| | | CTGGAGCAGACTTTGCAGTCTGTGGACTGCAACACAACATTGCCTTTATGT |
| | | GTAACTCTTGGCTGAAGCTCTTACACCAATGCTGGGGGACATGTACCTCCC |
| | | AGGGGCCCAGGAAGACTACGGGAGGCTACACCAACGTCAATCAGAGGGGCC |
| | | TGTGTAGCTACCGATAAGCGGACCCTCAAGAGGGCATTAGCAATAGTGTTT |
| | | ATAAGGCCCCCTTGTTAACCCTAAACGGGTAGCATATGCTTCCCGGGTAGT |
| | | AGTATATACTATCCAGACTAACCCTAATTCAATAGCATATGTTACCCAACG |
| | | GGAAGCATATGCTATCGAATTAGGGTTAGTAAAAGGGTCCTAAGGAACAGC |
| | | GATATCTCCCACCCCATGAGCTGTCACGGTTTTATTTACATGGGGTCAGGA |
| | | TTCCACGAGGGTAGTGAACCATTTTAGTCACAAGGGCAGTGGCTGAAGATC |
| | | AAGGAGCGGGCAGTGAACTCTCCTGAATCTTCGCCTGCTTCTTCATTCTCC |
| | | TTCGTTTAGCTAATAGAATAACTGCTGAGTTGTGAACAGTAAGGTGTATGT |
| | | GAGGTGCTCGAAAACAAGGTTTCAGGTGACGCCCCCAGAATAAAATTTGGA |
| | | CGGGGGGTTCAGTGGTGGCATTGTGCTATGACACCAATATAACCCTCACAA |
| | | ACCCCTTGGGCAATAAATACTAGTGTAGGAATGAAACATTCTGAATATCTT |
| | | TAACAATAGAAATCCATGGGGTGGGGACAAGCCGTAAAGACTGGATGTCCA |
| | | TCTCACACGAATTTATGGCTATGGGCAACACATAATCCTAGTGCAATATGA |
| | | TACTGGGGTTATTAAGATGTGTCCCAGGCAGGGACCAAGACAGGTGAACCA |
| | | TGTTGTTACACTCTATTTGTAACAAGGGGAAAGAGAGTGGACGCCGACAGC |
| | | AGCGGACTCCACTGGTTGTCTCTAACACCCCCGAAAATTAAACGGGGCTCC |
| | | ACGCCAATGGGGCCCATAAACAAAGACAAGTGGCCACTCTTTTTTTTGAAA |
| | | TTGTGGAGTGGGGGCACGCGTCAGCCCCCACACGCCGCCCTGCGGTTTTGG |
| | | ACTGTAAAATAAGGGTGTAATAACTTGGCTGATTGTAACCCCGCTAACCAC |
| | | TGCGGTCAAACCACTTGCCCACAAAACCACTAATGGCACCCCGGGGAATAC |
| | | CTGCATAAGTAGGTGGGCGGGCCAAGATAGGGGCGCGATTGCTGCGATCTG |
| | | GAGGACAAATTACACACACTTGCGCCTGAGCGCCAAGCACAGGGTTGTTGG |
| | | TCCTCATATTCACGAGGTCGCTGAGAGCACGGTGGGCTAATGTTGCCATGG |
| | | GTAGCATATACTACCCAAATATCTGGATAGCATATGCTATCCTAATCTATA |
| | | TCTGGGTAGCATAGGCTATCCTAATCTATATCTGGGTAGCATATGCTATCC |
| | | TAATCTATATCTGGGTAGTATATGCTATCCTAATTTATATCTGGGTAGCAT |
| | | AGGCTATCCTAATCTATATCTGGGTAGCATATGCTATCCTAATCTATATCT |
| | | GGGTAGTATATGCTATCCTAATCTGTATCCGGGTAGCATATGCTATCCTAA |
| | | TAGAGATTAGGGTAGTATATGCTATCCTAATTTATATCTGGGTAGCATATA |
| | | CTACCCAAATATCTGGATAGCATATGCTATCCTAATCTATATCTGGGTAGC |
| | | ATATGCTATCCTAATCTATATCTGGGTAGCATAGGCTATCCTAATCTATAT |
| | | CTGGGTAGCATATGCTATCCTAATCTATATCTGGGTAGTATATGCTATCCT |
| | | AATTTATATCTGGGTAGCATAGGCTATCCTAATCTATATCTGGGTAGCATA |
| | | TGCTATCCTAATCTATATCTGGGTAGTATATGCTATCCTAATCTGTATCCG |
| | | GGTAGCATATGCTATCCTCATGATAAGCTGTCAAACATGAGAATTTTCTTG |
| | | AAGACGAAAGGGCCTCGTGATACGCCTATTTTTATAGGTTAATGTCATGAT |
| | | AATAATGGTTTCTTAGACGTCAGGTGGCACTTTTCGGGGAAATGTGCGCGG |
| | | AACCCCTATTTGTTTATTTTTCTAAATACATTCAAATATGTATCCGCTCAT |
| | | GAGACAATAACCCTGATAAATGCTTCAATAATATTGAAAAAGGAAGAGTAT |
| | | GAGTATTCAACATTTCCGTGTCGCCCTTATTCCCTTTTTTGCGGCATTTTG |
| | | CCTTCCTGTTTTTGCTCACCCAGAAACGCTGGTGAAAGTAAAAGATGCTGA |
| | | AGATCAGTTGGGTGCACGAGTGGGTTACATCGAACTGGATCTCAACAGCGG |
| | | TAAGATCCTTGAGAGTTTTCGCCCCGAAGAACGTTTTCCAATGATGAGCAC |
| | | TTTTAAAGTTCTGCTATGTGGCGCGGTATTATCCCGTGTTGACGCCGGGCA |
| | | AGAGCAACTCGGTCGCCGCATACACTATTCTCAGAATGACTTGGTTGAGTA |
| | | CTCACCAGTCACAGAAAAGCATCTTACGGATGGCATGACAGTAAGAGAATT |
| | | ATGCAGTGCTGCCATAACCATGAGTGATAACACTGCGGCCAACTTACTTCT |
| | | GACAACGATCGGAGGACCGAAGGAGCTAACCGCTTTTTTGCACAACATGGG |
| | | GGATCATGTAACTCGCCTTGATCGTTGGGAACCGGAGCTGAATGAAGCCAT |
| | | ACCAAACGACGAGCGTGACACCACGATGCCTGCAGCAATGGCAACAACGTT |
| | | GCGCAAACTATTAACTGGCGAACTACTTACTCTAGCTTCCCGGCAACAATT |
| | | AATAGACTGGATGGAGGCGGATAAAGTTGCAGGACCACTTCTGCGCTCGGC |
| | | CCTTCCGGCTGGCTGGTTTATTGCTGATAAATCTGGAGCCGGTGAGCGTGG |
| | | GTCTCGCGGTATCATTGCAGCACTGGGGCCAGATGGTAAGCCCTCCCGTAT |
| | | CGTAGTTATCTACACGACGGGGAGTCAGGCAACTATGGATGAACGAAATAG |
| | | ACAGATCGCTGAGATAGGTGCCTCACTGATTAAGCATTGGTAACTGTCAGA |
| | | CCAAGTTTACTCATATATACTTTAGATTGATTTAAAACTTCATTTTTAATT |
| | | TAAAAGGATCTAGGTGAAGATCCTTTTTGATAATCTCATGACCAAAATCCC |
| | | TTAACGTGAGTTTTCGTTCCACTGAGCGTCAGACCCCGTAGAAAAGATCAA |
| | | AGGATCTTCTTGAGATCCTTTTTTTCTGCGCGTAATCTGCTGCTTGCAAAC |
| | | AAAAAAACCACCGCTACCAGCGGTGGTTTGTTTGCCGGATCAAGAGCTACC |
| | | AACTCTTTTTCCGAAGGTAACTGGCTTCAGCAGAGCGCAGATACCAAATAC |
| | | TGTTCTTCTAGTGTAGCCGTAGTTAGGCCACCACTTCAAGAACTCTGTAGC |
| | | ACCGCCTACATACCTCGCTCTGCTAATCCTGTTACCAGTGGCTGCTGCCAG |
| | | TGGCGATAAGTCGTGTCTTACCGGGTTGGACTCAAGACGATAGTTACCGGA |
| | | TAAGGCGCAGCGGTCGGGCTGAACGGGGGGTTCGTGCACACAGCCCAGCTT |
| | | GGAGCGAACGACCTACACCGAACTGAGATACCTACAGCGTGAGCTATGAGA |
| | | AAGCGCCACGCTTCCCGAAGGGAGAAAGGCGGACAGGTATCCGGTAAGCGG |
| | | CAGGGTCGGAACAGGAGAGCGCACGAGGGAGCTTCCAGGGGGAAACGCCTG |
| | | GTATCTTTATAGTCCTGTCGGGTTTCGCCACCTCTGACTTGAGCGTCGATT |
| | | TTTGTGATGCTCGTCAGGGGGGCGGAGCCTATGGAAAAACGCCAGCAACGC |
| | | GGCCTTTTTACGGTTCCTGGCCTTTTGCTGGCCTTTTGCTCACATGTTCTT |
| | | TCCTGCGTTATCCCCTGATTCTGTGGATAACCGTATTACCGCCTTTGAGTG |
| | | AGCTGATACCGCTCGCCGCAGCCGAACGACCGAGCGCAGCGAGTCAGTGAG |
| | | CGAGGAAGCGGAAGAGCGCCCAATACGCAAACCGCCTCTCCCCGCGCGTTG |
| | | GCCGATTCATTAATGCAGCTGGCACGACAGGTTTCCCGACTGGAAAGCGGG |
| | | CAGTGAGCGCAACGCAATTAATGTGAGTTAGCTCACTCATTAGGCACCCCA |
| | | GGCTTTACACTTTATGCTTCCGGCTCGTATGTTGTGTGGAATTGTGAGCGG |
| | | ATAACAATTTCACACAGGAAACAGCTATGACCATGATTACGCCAAGCTCTA |
| | | GCTAGAGGTCGAGTCCCTCCCCAGCAGGCAGAAGTATGCAAAGCATGCTAC |
| | | TCAATTAGTCAGCAACCATAGTCCCGCCCCTAACTCCGCCCATCCCGCCCC |
| | | TAACTCCGCCCAGTTCCGCCCATTCTCCGCCCCATGGCTGACTAATTTTTT |
| | | TTATTTATGCAGAGGCCGAGGCCGCCTCGGCCTCTGAGCTATTCCAGAAGT |
| | | AGTGAGGAGGCTTTTTTGGAGGCCTAGGCTTTTGCAAAAAGCTTTGCAAAG |
| | | ATGGATAAAGTTTTAAACAGAGAGGAATCTTTGCAGCTAATGGACCTTCTA |
| | | GGTCTTGAAAGGAGTGGGAATTGGCTCCGGTGCCCGTCAGTGGGCAGAGCG |
| | | CACATCGCCCACAGTCCCCGAGAAGTTGGGGGGAGGGGTCGGCAATTGAAC |
| | | CGGTGCCTAGAGAAGGTGGCGCGGGGTAAACTGGGAAAGTGATGTCGTGTA |
| | | CTGGCTCCGCCTTTTTCCCGAGGGTGGGGGAGAACCGTATATAAGTGCAGT |
| | | AGTCGCCGTGAACGTTCTTTTTCGCAACGGGTTTGCCGCCAGAACACAGGT |
| | | AAGTGCCGTGTGTGGTTCCCGCGGGCCTGGCCTCTTTACGGGTTATGGCCC |
| | | TTGCGTGCCTTGAATTACTTCCACCTGGCTGCAGTACGTGATTCTTGATCC |
| | | CGAGCTTCGGGTTGGAAGTGGGTGGGAGAGTTCGAGGCCTTGCGCTTAAGG |
| | | AGCCCCTTCGCCTCGTGCTTGAGTTGAGGCCTGGCCTGGGCGCTGGGGCCG |
| | | CCGCGTGCGAATCTGGTGGCACCTTCGCGCCTGTCTCGCTGCTTTCGATAA |
| | | GTCTCTAGCCATTTAAAATTTTTGATGACCTGCTGCGACGCTTTTTTTCTG |
| | | GCAAGATAGTCTTGTAAATGCGGGCCAAGATCTGCACACTGGTATTTCGGT |
| | | TTTTGGGGCCGCGGGCGGCGACGGGGCCCGTGCGTCCCAGCGCACATGTTC |
| | | GGCGAGGCGGGGCCTGCGAGCGCGGCCACCGAGAATCGGACGGGGGTAGTC |
| | | TCAAGCTGGCCGGCCTGCTCTGGTGCCTGGCCTCGCGCCGCCGTGTATCGC |
| | | CCCGCCCTGGGCGGCAAGGCTGGCCCGGTCGGCACCAGTTGCGTGAGCGGA |
| | | AAGATGGCCGCTTCCCGGCCCTGCTGCAGGGAGCTCAAAATGGAGGACGCG |
| | | GCGCTCGGGAGAGCGGGCGGGTGAGTCACCCACACAAAGGAAAAGGGCCTT |
| | | TCCGTCCTCAGCCGTCGCTTCATGTGACTCCACGGAGTACCGGGCGCCGTC |
| | | CAGGCACCTCGATTAGTTCTCGAGCTTTTGGAGTACGTCGTCTTTAGGTTG |
| | | GGGGGAGGGGTTTTATGCGATGGAGTTTCCCCACACTGAGTGGGTGGAGAC |
| | | TGAAGTTAGGCCAGCTTGGCACTTGATGTAATTCTCCTTGGAATTTGCCCT |
| | | TTTTGAGTTTGGATCTTGGTTCATTCTCAAGCCTCAGACAGTGGTTCAAAG |
| | | TTTTTTTCTTCCATTTCAGGTGTCGTGAGGAATTCTCTAGAGATCCCTCGA |
| | | CCTCGAGATCCATTGTGCCCGGGCGCACCATGGACATGCGCGTGCCCGCCC |
| | | AGCTGCTGGGCCTGCTGCTGCTGTGGTTCCCCGGCTCGCGATGC |
| V3 | 932 | CAACCCAAGGCTGCCCCCTCGGTCACTCTGTTCCCGCCCTCCTCTGAGGAG |
| | | CTTCAAGCCAACAAGGCCACACTGGTGTGTCTCATAAGTGACTTCTACCCG |
| | | GGAGCCGTGACAGTGGCCTGGAAGGCAGATAGCAGCCCCGTCAAGGCGGGA |
| | | GTGGAGACCACCACACCCTCCAAACAAAGCAACAACAAGTACGCGGCCAGC |
| | | AGCTACCTGAGCCTGACGCCTGAGCAGTGGAAGTCCCACAGAAGCTACAGC |
| | | TGCCAGGTCACGCATGAAGGGAGCACCGTGGAGAAGACAGTGGCCCCTACA |
| | | GAATGTTCATGAGCGGCCGCTCGAGGCCGGCAAGGCCGGATCCCCCGACCT |
| | | CGACCTCTGGCTAATAAAGGAAATTTATTTTCATTGCAATAGTGTGTTGGA |
| | | ATTTTTTGTGTCTCTCACTCGGAAGGACATATGGGAGGGCAAATCATTTGG |
| | | TCGAGATCCCTCGGAGATCTCTAGCTAGAGGATCGATCCCCGCCCCGGACG |
| | | AACTAAACCTGACTACGACATCTCTGCCCCTTCTTCGCGGGGCAGTGCATG |
| | | TAATCCCTTCAGTTGGTTGGTACAACTTGCCAACTGGGCCCTGTTCCACAT |
| | | GTGACACGGGGGGGGACCAAACACAAAGGGGTTCTCTGACTGTAGTTGACA |
| | | TCCTTATAAATGGATGTGCACATTTGCCAACACTGAGTGGCTTTCATCCTG |
| | | GAGCAGACTTTGCAGTCTGTGGACTGCAACACAACATTGCCTTTATGTGTA |
| | | ACTCTTGGCTGAAGCTCTTACACCAATGCTGGGGGACATGTACCTCCCAGG |
| | | GGCCCAGGAAGACTACGGGAGGCTACACCAACGTCAATCAGAGGGGCCTGT |
| | | GTAGCTACCGATAAGCGGACCCTCAAGAGGGCATTAGCAATAGTGTTTATA |
| | | AGGCCCCCTTGTTAACCCTAAACGGGTAGCATATGCTTCCCGGGTAGTAGT |
| | | ATATACTATCCAGACTAACCCTAATTCAATAGCATATGTTACCCAACGGGA |
| | | AGCATATGCTATCGAATTAGGGTTAGTAAAAGGGTCCTAAGGAACAGCGAT |
| | | ATCTCCCACCCCATGAGCTGTCACGGTTTTATTTACATGGGGTCAGGATTC |
| | | CACGAGGGTAGTGAACCATTTTAGTCACAAGGGCAGTGGCTGAAGATCAAG |
| | | GAGCGGGCAGTGAACTCTCCTGAATCTTCGCCTGCTTCTTCATTCTCCTTC |
| | | GTTTAGCTAATAGAATAACTGCTGAGTTGTGAACAGTAAGGTGTATGTGAG |
| | | GTGCTCGAAAACAAGGTTTCAGGTGACGCCCCCAGAATAAAATTTGGACGG |
| | | GGGGTTCAGTGGTGGCATTGTGCTATGACACCAATATAACCCTCACAAACC |
| | | CCTTGGGCAATAAATACTAGTGTAGGAATGAAACATTCTGAATATCTTTAA |
| | | CAATAGAAATCCATGGGGTGGGGACAAGCCGTAAAGACTGGATGTCCATCT |
| | | CACACGAATTTATGGCTATGGGCAACACATAATCCTAGTGCAATATGATAC |
| | | TGGGGTTATTAAGATGTGTCCCAGGCAGGGACCAAGACAGGTGAACCATGT |
| | | TGTTACACTCTATTTGTAACAAGGGGAAAGAGAGTGGACGCCGACAGCAGC |
| | | GGACTCCACTGGTTGTCTCTAACACCCCCGAAAATTAAACGGGGCTCCACG |
| | | CCAATGGGGCCCATAAACAAAGACAAGTGGCCACTCTTTTTTTTGAAATTG |
| | | TGGAGTGGGGGCACGCGTCAGCCCCCACACGCCGCCCTGCGGTTTTGGACT |
| | | GTAAAATAAGGGTGTAATAACTTGGCTGATTGTAACCCCGCTAACCACTGC |
| | | GGTCAAACCACTTGCCCACAAAACCACTAATGGCACCCCGGGGAATACCTG |
| | | CATAAGTAGGTGGGCGGGCCAAGATAGGGGCGCGATTGCTGCGATCTGGAG |
| | | GACAAATTACACACACTTGCGCCTGAGCGCCAAGCACAGGGTTGTTGGTCC |
| | | TCATATTCACGAGGTCGCTGAGAGCACGGTGGGCTAATGTTGCCATGGGTA |
| | | GCATATACTACCCAAATATCTGGATAGCATATGCTATCCTAATCTATATCT |
| | | GGGTAGCATAGGCTATCCTAATCTATATCTGGGTAGCATATGCTATCCTAA |
| | | TCTATATCTGGGTAGTATATGCTATCCTAATTTATATCTGGGTAGCATAGG |
| | | CTATCCTAATCTATATCTGGGTAGCATATGCTATCCTAATCTATATCTGGG |
| | | TAGTATATGCTATCCTAATCTGTATCCGGGTAGCATATGCTATCCTAATAG |
| | | AGATTAGGGTAGTATATGCTATCCTAATTTATATCTGGGTAGCATATACTA |
| | | CCCAAATATCTGGATAGCATATGCTATCCTAATCTATATCTGGGTAGCATA |
| | | TGCTATCCTAATCTATATCTGGGTAGCATAGGCTATCCTAATCTATATCTG |
| | | GGTAGCATATGCTATCCTAATCTATATCTGGGTAGTATATGCTATCCTAAT |
| | | TTATATCTGGGTAGCATAGGCTATCCTAATCTATATCTGGGTAGCATATGC |
| | | TATCCTAATCTATATCTGGGTAGTATATGCTATCCTAATCTGTATCCGGGT |
| | | AGCATATGCTATCCTCATGATAAGCTGTCAAACATGAGAATTTTCTTGAAG |
| | | ACGAAAGGGCCTCGTGATACGCCTATTTTTATAGGTTAATGTCATGATAAT |
| | | AATGGTTTCTTAGACGTCAGGTGGCACTTTTCGGGGAAATGTGCGCGGAAC |
| | | CCCTATTTGTTTATTTTTCTAAATACATTCAAATATGTATCCGCTCATGAG |
| | | ACAATAACCCTGATAAATGCTTCAATAATATTGAAAAAGGAAGAGTATGAG |
| | | TATTCAACATTTCCGTGTCGCCCTTATTCCCTTTTTTGCGGCATTTTGCCT |
| | | TCCTGTTTTTGCTCACCCAGAAACGCTGGTGAAAGTAAAAGATGCTGAAGA |
| | | TCAGTTGGGTGCACGAGTGGGTTACATCGAACTGGATCTCAACAGCGGTAA |
| | | GATCCTTGAGAGTTTTCGCCCCGAAGAACGTTTTCCAATGATGAGCACTTT |
| | | TAAAGTTCTGCTATGTGGCGCGGTATTATCCCGTGTTGACGCCGGGCAAGA |
| | | GCAACTCGGTCGCCGCATACACTATTCTCAGAATGACTTGGTTGAGTACTC |
| | | ACCAGTCACAGAAAAGCATCTTACGGATGGCATGACAGTAAGAGAATTATG |
| | | CAGTGCTGCCATAACCATGAGTGATAACACTGCGGCCAACTTACTTCTGAC |
| | | AACGATCGGAGGACCGAAGGAGCTAACCGCTTTTTTGCACAACATGGGGGA |
| | | TCATGTAACTCGCCTTGATCGTTGGGAACCGGAGCTGAATGAAGCCATACC |
| | | AAACGACGAGCGTGACACCACGATGCCTGCAGCAATGGCAACAACGTTGCG |
| | | CAAACTATTAACTGGCGAACTACTTACTCTAGCTTCCCGGCAACAATTAAT |
| | | AGACTGGATGGAGGCGGATAAAGTTGCAGGACCACTTCTGCGCTCGGCCCT |
| | | TCCGGCTGGCTGGTTTATTGCTGATAAATCTGGAGCCGGTGAGCGTGGGTC |
| | | TCGCGGTATCATTGCAGCACTGGGGCCAGATGGTAAGCCCTCCCGTATCGT |
| | | AGTTATCTACACGACGGGGAGTCAGGCAACTATGGATGAACGAAATAGACA |
| | | GATCGCTGAGATAGGTGCCTCACTGATTAAGCATTGGTAACTGTCAGACCA |
| | | AGTTTACTCATATATACTTTAGATTGATTTAAAACTTCATTTTTAATTTAA |
| | | AAGGATCTAGGTGAAGATCCTTTTTGATAATCTCATGACCAAAATCCCTTA |
| | | ACGTGAGTTTTCGTTCCACTGAGCGTCAGACCCCGTAGAAAAGATCAAAGG |
| | | ATCTTCTTGAGATCCTTTTTTTCTGCGCGTAATCTGCTGCTTGCAAACAAA |
| | | AAAACCACCGCTACCAGCGGTGGTTTGTTTGCCGGATCAAGAGCTACCAAC |
| | | TCTTTTTCCGAAGGTAACTGGCTTCAGCAGAGCGCAGATACCAAATACTGT |
| | | TCTTCTAGTGTAGCCGTAGTTAGGCCACCACTTCAAGAACTCTGTAGCACC |
| | | GCCTACATACCTCGCTCTGCTAATCCTGTTACCAGTGGCTGCTGCCAGTGG |
| | | CGATAAGTCGTGTCTTACCGGGTTGGACTCAAGACGATAGTTACCGGATAA |
| | | GGCGCAGCGGTCGGGCTGAACGGGGGGTTCGTGCACACAGCCCAGCTTGGA |
| | | GCGAACGACCTACACCGAACTGAGATACCTACAGCGTGAGCTATGAGAAAG |
| | | CGCCACGCTTCCCGAAGGGAGAAAGGCGGACAGGTATCCGGTAAGCGGCAG |
| | | GGTCGGAACAGGAGAGCGCACGAGGGAGCTTCCAGGGGGAAACGCCTGGTA |
| | | TCTTTATAGTCCTGTCGGGTTTCGCCACCTCTGACTTGAGCGTCGATTTTT |
| | | GTGATGCTCGTCAGGGGGGCGGAGCCTATGGAAAAACGCCAGCAACGCGGC |
| | | CTTTTTACGGTTCCTGGCCTTTTGCTGGCCTTTTGCTCACATGTTCTTTCC |
| | | TGCGTTATCCCCTGATTCTGTGGATAACCGTATTACCGCCTTTGAGTGAGC |
| | | TGATACCGCTCGCCGCAGCCGAACGACCGAGCGCAGCGAGTCAGTGAGCGA |
| | | GGAAGCGGAAGAGCGCCCAATACGCAAACCGCCTCTCCCCGCGCGTTGGCC |
| | | GATTCATTAATGCAGCTGGCACGACAGGTTTCCCGACTGGAAAGCGGGCAG |
| | | TGAGCGCAACGCAATTAATGTGAGTTAGCTCACTCATTAGGCACCCCAGGC |
| | | TTTACACTTTATGCTTCCGGCTCGTATGTTGTGTGGAATTGTGAGCGGATA |
| | | ACAATTTCACACAGGAAACAGCTATGACCATGATTACGCCAAGCTCTAGCT |
| | | AGAGGTCGAGTCCCTCCCCAGCAGGCAGAAGTATGCAAAGCATGCATCTCA |
| | | ATTAGTCAGCAACCATAGTCCCGCCCCTAACTCCGCCCATCCCGCCCCTAA |
| | | CTCCGCCCAGTTCCGCCCATTCTCCGCCCCATGGCTGACTAATTTTTTTTA |
| | | TTTATGCAGAGGCCGAGGCCGCCTCGGCCTCTGAGCTATTCCAGAAGTAGT |
| | | GAGGAGGCTTTTTTGGAGGCCTAGGCTTTTGCAAAAAGCTTTGCAAAGATG |
| | | GATAAAGTTTTAAACAGAGAGGAATCTTTGCAGCTAATGGACCTTCTAGGT |
| | | CTTGAAAGGAGTGGGAATTGGCTCCGGTGCCCGTCAGTGGGCAGAGCGCAC |
| | | ATCGCCCACAGTCCCCGAGAAGTTGGGGGGAGGGGTCGGCAATTGAACCGG |
| | | TGCCTAGAGAAGGTGGCGCGGGGTAAACTGGGAAAGTGATGTCGTGTACTG |
| | | GCTCCGCCTTTTTCCCGAGGGTGGGGGAGAACCGTATATAAGTGCAGTAGT |
| | | CGCCGTGAACGTTCTTTTTCGCAACGGGTTTGCCGCCAGAACACAGGTAAG |
| | | TGCCGTGTGTGGTTCCCGCGGGCCTGGCCTCTTTACGGGTTATGGCCCTTG |
| | | CGTGCCTTGAATTACTTCCACCTGGCTGCAGTACGTGATTCTTGATCCCGA |
| | | GCTTCGGGTTGGAAGTGGGTGGGAGAGTTCGAGGCCTTGCGCTTAAGGAGC |
| | | CCCTTCGCCTCGTGCTTGAGTTGAGGCCTGGCCTGGGCGCTGGGGCCGCCG |
| | | CGTGCGAATCTGGTGGCACCTTCGCGCCTGTCTCGCTGCTTTCGATAAGTC |
| | | TCTAGCCATTTAAAATTTTTGATGACCTGCTGCGACGCTTTTTTTCTGGCA |
| | | AGATAGTCTTGTAAATGCGGGCCAAGATCTGCACACTGGTATTTCGGTTTT |
| | | TGGGGCCGCGGGCGGCGACGGGGCCCGTGCGTCCCAGCGCACATGTTCGGC |
| | | GAGGCGGGGCCTGCGAGCGCGGCCACCGAGAATCGGACGGGGGTAGTCTCA |
| | | AGCTGGCCGGCCTGCTCTGGTGCCTGGCCTCGCGCCGCCGTGTATCGCCCC |
| | | GCCCTGGGCGGCAAGGCTGGCCCGGTCGGCACCAGTTGCGTGAGCGGAAAG |
| | | ATGGCCGCTTCCCGGCCCTGCTGCAGGGAGCTCAAAATGGAGGACGCGGCG |
| | | CTCGGGAGAGCGGGCGGGTGAGTCACCCACACAAAGGAAAAGGGCCTTTCC |
| | | GTCCTCAGCCGTCGCTTCATGTGACTCCACGGAGTACCGGGCGCCGTCCAG |
| | | GCACCTCGATTAGTTCTCGAGCTTTTGGAGTACGTCGTCTTTAGGTTGGGG |
| | | GGAGGGGTTTTATGCGATGGAGTTTCCCCACACTGAGTGGGTGGAGACTGA |
| | | AGTTAGGCCAGCTTGGCACTTGATGTAATTCTCCTTGGAATTTGCCCTTTT |
| | | TGAGTTTGGATCTTGGTTCATTCTCAAGCCTCAGACAGTGGTTCAAAGTTT |
| | | TTTTCTTCCATTTCAGGTGTCGTGAGGAATTCTCTAGAGATCCCTCGACCT |
| | | CGAGATCCATTGTGCCCGGGCGCCACCATGACTTGGACCCCACTCCTCTTC |
| | | CTCACCCTCCTCCTCCACTGCACAGGAAGCTTATCG |
| V4 | 933 | ACGGTGGCTGCACCATCTGTCTTCATCTTCCCGCCATCTGATGAGCAGTTG |
| | | AAATCTGGAACTGCCTCTGTTGTGTGCCTGCTGAATAACTTCTATCCCAGA |
| | | GAGGCCAAAGTACAGTGGAAGGTGGATAACGCCCTCCAATCGGGTAACTCC |
| | | CAGGAGAGTGTCACAGAGCAGGACAGCAAGGACAGCACCTACAGCCTCAGC |
| | | AGCACCCTGACGCTGAGCAAAGCAGACTACGAGAAACACAAAGTCTACGCC |
| | | TGCGAAGTCACCCATCAGGGCCTGAGCTCGCCCGTCACAAAGAGCTTCAAC |
| | | AGGGGAGAGTGTTGAGCGGCCGCTCGAGGCCGGCAAGGCCGGATCCCCCGA |
| | | CCTCGACCTCTGGCTAATAAAGGAAATTTATTTTCATTGCAATAGTGTGTT |
| | | GGAATTTTTTGTGTCTCTCACTCGGAAGGACATATGGGAGGGCAAATCATT |
| | | TGGTCGAGATCCCTCGGAGATCTCTAGCTAGAGGATCGATCCCCGCCCCGG |
| | | ACGAACTAAACCTGACTACGACATCTCTGCCCCTTCTTCGCGGGGCAGTGC |
| | | ATGTAATCCCTTCAGTTGGTTGGTACAACTTGCCAACTGGGCCCTGTTCCA |
| | | CATGTGACACGGGGGGGGACCAAACACAAAGGGGTTCTCTGACTGTAGTTG |
| | | ACATCCTTATAAATGGATGTGCACATTTGCCAACACTGAGTGGCTTTCATC |
| | | CTGGAGCAGACTTTGCAGTCTGTGGACTGCAACACAACATTGCCTTTATGT |
| | | GTAACTCTTGGCTGAAGCTCTTACACCAATGCTGGGGGACATGTACCTCCC |
| | | AGGGGCCCAGGAAGACTACGGGAGGCTACACCAACGTCAATCAGAGGGGCC |
| | | TGTGTAGCTACCGATAAGCGGACCCTCAAGAGGGCATTAGCAATAGTGTTT |
| | | ATAAGGCCCCCTTGTTAACCCTAAACGGGTAGCATATGCTTCCCGGGTAGT |
| | | AGTATATACTATCCAGACTAACCCTAATTCAATAGCATATGTTACCCAACG |
| | | GGAAGCATATGCTATCGAATTAGGGTTAGTAAAAGGGTCCTAAGGAACAGC |
| | | GATATCTCCCACCCCATGAGCTGTCACGGTTTTATTTACATGGGGTCAGGA |
| | | TTCCACGAGGGTAGTGAACCATTTTAGTCACAAGGGCAGTGGCTGAAGATC |
| | | AAGGAGCGGGCAGTGAACTCTCCTGAATCTTCGCCTGCTTCTTCATTCTCC |
| | | TTCGTTTAGCTAATAGAATAACTGCTGAGTTGTGAACAGTAAGGTGTATGT |
| | | GAGGTGCTCGAAAACAAGGTTTCAGGTGACGCCCCCAGAATAAAATTTGGA |
| | | CGGGGGGTTCAGTGGTGGCATTGTGCTATGACACCAATATAACCCTCACAA |
| | | ACCCCTTGGGCAATAAATACTAGTGTAGGAATGAAACATTCTGAATATCTT |
| | | TAACAATAGAAATCCATGGGGTGGGGACAAGCCGTAAAGACTGGATGTCCA |
| | | TCTCACACGAATTTATGGCTATGGGCAACACATAATCCTAGTGCAATATGA |
| | | TACTGGGGTTATTAAGATGTGTCCCAGGCAGGGACCAAGACAGGTGAACCA |
| | | TGTTGTTACACTCTATTTGTAACAAGGGGAAAGAGAGTGGACGCCGACAGC |
| | | AGCGGACTCCACTGGTTGTCTCTAACACCCCCGAAAATTAAACGGGGCTCC |
| | | ACGCCAATGGGGCCCATAAACAAAGACAAGTGGCCACTCTTTTTTTTGAAA |
| | | TTGTGGAGTGGGGGCACGCGTCAGCCCCCACACGCCGCCCTGCGGTTTTGG |
| | | ACTGTAAAATAAGGGTGTAATAACTTGGCTGATTGTAACCCCGCTAACCAC |
| | | TGCGGTCAAACCACTTGCCCACAAAACCACTAATGGCACCCCGGGGAATAC |
| | | CTGCATAAGTAGGTGGGCGGGCCAAGATAGGGGCGCGATTGCTGCGATCTG |
| | | GAGGACAAATTACACACACTTGCGCCTGAGCGCCAAGCACAGGGTTGTTGG |
| | | TCCTCATATTCACGAGGTCGCTGAGAGCACGGTGGGCTAATGTTGCCATGG |
| | | GTAGCATATACTACCCAAATATCTGGATAGCATATGCTATCCTAATCTATA |
| | | TCTGGGTAGCATAGGCTATCCTAATCTATATCTGGGTAGCATATGCTATCC |
| | | TAATCTATATCTGGGTAGTATATGCTATCCTAATTTATATCTGGGTAGCAT |
| | | AGGCTATCCTAATCTATATCTGGGTAGCATATGCTATCCTAATCTATATCT |
| | | GGGTAGTATATGCTATCCTAATCTGTATCCGGGTAGCATATGCTATCCTAA |
| | | TAGAGATTAGGGTAGTATATGCTATCCTAATTTATATCTGGGTAGCATATA |
| | | CTACCCAAATATCTGGATAGCATATGCTATCCTAATCTATATCTGGGTAGC |
| | | ATATGCTATCCTAATCTATATCTGGGTAGCATAGGCTATCCTAATCTATAT |
| | | CTGGGTAGCATATGCTATCCTAATCTATATCTGGGTAGTATATGCTATCCT |
| | | AATTTATATCTGGGTAGCATAGGCTATCCTAATCTATATCTGGGTAGCATA |
| | | TGCTATCCTAATCTATATCTGGGTAGTATATGCTATCCTAATCTGTATCCG |
| | | GGTAGCATATGCTATCCTCATGATAAGCTGTCAAACATGAGAATTTTCTTG |
| | | AAGACGAAAGGGCCTCGTGATACGCCTATTTTTATAGGTTAATGTCATGAT |
| | | AATAATGGTTTCTTAGACGTCAGGTGGCACTTTTCGGGGAAATGTGCGCGG |
| | | AACCCCTATTTGTTTATTTTTCTAAATACATTCAAATATGTATCCGCTCAT |
| | | GAGACAATAACCCTGATAAATGCTTCAATAATATTGAAAAAGGAAGAGTAT |
| | | GAGTATTCAACATTTCCGTGTCGCCCTTATTCCCTTTTTTGCGGCATTTTG |
| | | CCTTCCTGTTTTTGCTCACCCAGAAACGCTGGTGAAAGTAAAAGATGCTGA |
| | | AGATCAGTTGGGTGCACGAGTGGGTTACATCGAACTGGATCTCAACAGCGG |
| | | TAAGATCCTTGAGAGTTTTCGCCCCGAAGAACGTTTTCCAATGATGAGCAC |
| | | TTTTAAAGTTCTGCTATGTGGCGCGGTATTATCCCGTGTTGACGCCGGGCA |
| | | AGAGCAACTCGGTCGCCGCATACACTATTCTCAGAATGACTTGGTTGAGTA |
| | | CTCACCAGTCACAGAAAAGCATCTTACGGATGGCATGACAGTAAGAGAATT |
| | | ATGCAGTGCTGCCATAACCATGAGTGATAACACTGCGGCCAACTTACTTCT |
| | | GACAACGATCGGAGGACCGAAGGAGCTAACCGCTTTTTTGCACAACATGGG |
| | | GGATCATGTAACTCGCCTTGATCGTTGGGAACCGGAGCTGAATGAAGCCAT |
| | | ACCAAACGACGAGCGTGACACCACGATGCCTGCAGCAATGGCAACAACGTT |
| | | GCGCAAACTATTAACTGGCGAACTACTTACTCTAGCTTCCCGGCAACAATT |
| | | AATAGACTGGATGGAGGCGGATAAAGTTGCAGGACCACTTCTGCGCTCGGC |
| | | CCTTCCGGCTGGCTGGTTTATTGCTGATAAATCTGGAGCCGGTGAGCGTGG |
| | | GTCTCGCGGTATCATTGCAGCACTGGGGCCAGATGGTAAGCCCTCCCGTAT |
| | | CGTAGTTATCTACACGACGGGGAGTCAGGCAACTATGGATGAACGAAATAG |
| | | ACAGATCGCTGAGATAGGTGCCTCACTGATTAAGCATTGGTAACTGTCAGA |
| | | CCAAGTTTACTCATATATACTTTAGATTGATTTAAAACTTCATTTTTAATT |
| | | TAAAAGGATCTAGGTGAAGATCCTTTTTGATAATCTCATGACCAAAATCCC |
| | | TTAACGTGAGTTTTCGTTCCACTGAGCGTCAGACCCCGTAGAAAAGATCAA |
| | | AGGATCTTCTTGAGATCCTTTTTTTCTGCGCGTAATCTGCTGCTTGCAAAC |
| | | AAAAAAACCACCGCTACCAGCGGTGGTTTGTTTGCCGGATCAAGAGCTACC |
| | | AACTCTTTTTCCGAAGGTAACTGGCTTCAGCAGAGCGCAGATACCAAATAC |
| | | TGTTCTTCTAGTGTAGCCGTAGTTAGGCCACCACTTCAAGAACTCTGTAGC |
| | | ACCGCCTACATACCTCGCTCTGCTAATCCTGTTACCAGTGGCTGCTGCCAG |
| | | TGGCGATAAGTCGTGTCTTACCGGGTTGGACTCAAGACGATAGTTACCGGA |
| | | TAAGGCGCAGCGGTCGGGCTGAACGGGGGGTTCGTGCACACAGCCCAGCTT |
| | | GGAGCGAACGACCTACACCGAACTGAGATACCTACAGCGTGAGCTATGAGA |
| | | AAGCGCCACGCTTCCCGAAGGGAGAAAGGCGGACAGGTATCCGGTAAGCGG |
| | | CAGGGTCGGAACAGGAGAGCGCACGAGGGAGCTTCCAGGGGGAAACGCCTG |
| | | GTATCTTTATAGTCCTGTCGGGTTTCGCCACCTCTGACTTGAGCGTCGATT |
| | | TTTGTGATGCTCGTCAGGGGGGCGGAGCCTATGGAAAAACGCCAGCAACGC |
| | | GGCCTTTTTACGGTTCCTGGCCTTTTGCTGGCCTTTTGCTCACATGTTCTT |
| | | TCCTGCGTTATCCCCTGATTCTGTGGATAACCGTATTACCGCCTTTGAGTG |
| | | AGCTGATACCGCTCGCCGCAGCCGAACGACCGAGCGCAGCGAGTCAGTGAG |
| | | CGAGGAAGCGGAAGAGCGCCCAATACGCAAACCGCCTCTCCCCGCGCGTTG |
| | | GCCGATTCATTAATGCAGCTGGCACGACAGGTTTCCCGACTGGAAAGCGGG |
| | | CAGTGAGCGCAACGCAATTAATGTGAGTTAGCTCACTCATTAGGCACCCCA |
| | | GGCTTTACACTTTATGCTTCCGGCTCGTATGTTGTGTGGAATTGTGAGCGG |
| | | ATAACAATTTCACACAGGAAACAGCTATGACCATGATTACGCCAAGCTCTA |
| | | GCTAGAGGTCGAGTCCCTCCCCAGCAGGCAGAAGTATGCAAAGCATGCATC |
| | | TCAATTAGTCAGCAACCATAGTCCCGCCCCTAACTCCGCCCATCCCGCCCC |
| | | TAACTCCGCCCAGTTCCGCCCATTCTCCGCCCCATGGCTGACTAATTTTTT |
| | | TTATTTATGCAGAGGCCGAGGCCGCCTCGGCCTCTGAGCTATTCCAGAAGT |
| | | AGTGAGGAGGCTTTTTTGGAGGCCTAGGCTTTTGCAAAAAGCTTTGCAAAG |
| | | ATGGATAAAGTTTTAAACAGAGAGGAATCTTTGCAGCTAATGGACCTTCTA |
| | | GGTCTTGAAAGGAGTGGGAATTGGCTCCGGTGCCCGTCAGTGGGCAGAGCG |
| | | CACATCGCCCACAGTCCCCGAGAAGTTGGGGGGAGGGGTCGGCAATTGAAC |
| | | CGGTGCCTAGAGAAGGTGGCGCGGGGTAAACTGGGAAAGTGATGTCGTGTA |
| | | CTGGCTCCGCCTTTTTCCCGAGGGTGGGGGAGAACCGTATATAAGTGCAGT |
| | | AGTCGCCGTGAACGTTCTTTTTCGCAACGGGTTTGCCGCCAGAACACAGGT |
| | | AAGTGCCGTGTGTGGTTCCCGCGGGCCTGGCCTCTTTACGGGTTATGGCCC |
| | | TTGCGTGCCTTGAATTACTTCCACCTGGCTGCAGTACGTGATTCTTGATCC |
| | | CGAGCTTCGGGTTGGAAGTGGGTGGGAGAGTTCGAGGCCTTGCGCTTAAGG |
| | | AGCCCCTTCGCCTCGTGCTTGAGTTGAGGCCTGGCCTGGGCGCTGGGGCCG |
| | | CCGCGTGCGAATCTGGTGGCACCTTCGCGCCTGTCTCGCTGCTTTCGATAA |
| | | GTCTCTAGCCATTTAAAATTTTTGATGACCTGCTGCGACGCTTTTTTTCTG |
| | | GCAAGATAGTCTTGTAAATGCGGGCCAAGATCTGCACACTGGTATTTCGGT |
| | | TTTTGGGGCCGCGGGCGGCGACGGGGCCCGTGCGTCCCAGCGCACATGTTC |
| | | GGCGAGGCGGGGCCTGCGAGCGCGGCCACCGAGAATCGGACGGGGGTAGTC |
| | | TCAAGCTGGCCGGCCTGCTCTGGTGCCTGGCCTCGCGCCGCCGTGTATCGC |
| | | CCCGCCCTGGGCGGCAAGGCTGGCCCGGTCGGCACCAGTTGCGTGAGCGGA |
| | | AAGATGGCCGCTTCCCGGCCCTGCTGCAGGGAGCTCAAAATGGAGGACGCG |
| | | GCGCTCGGGAGAGCGGGCGGGTGAGTCACCCACACAAAGGAAAAGGGCCTT |
| | | TCCGTCCTCAGCCGTCGCTTCATGTGACTCCACGGAGTACCGGGCGCCGTC |
| | | CAGGCACCTCGATTAGTTCTCGAGCTTTTGGAGTACGTCGTCTTTAGGTTG |
| | | GGGGGAGGGGTTTTATGCGATGGAGTTTCCCCACACTGAGTGGGTGGAGAC |
| | | TGAAGTTAGGCCAGCTTGGCACTTGATGTAATTCTCCTTGGAATTTGCCCT |
| | | TTTTGAGTTTGGATCTTGGTTCATTCTCAAGCCTCAGACAGTGGTTCAAAG |
| | | TTTTTTTCTTCCATTTCAGGTGTCGTGAGGAATTCTCTAGAGATCCCTCGA |
| | | CCTCGAGATCCATTGTGCCCGGGCGCACCATGACTTGGACCCCACTCCTCT |
| | | TCCTCACCCTCCTCCTCCACTGCACAGGAAGCTTATCG |
| V5 | 934 | CAACCCAAGGCTGCCCCCTCGGTCACTCTGTTCCCGCCCTCCTCTGAGGAG |
| | | CTTCAAGCCAACAAGGCCACACTGGTGTGTCTCATAAGTGACTTCTACCCG |
| | | GGAGCCGTGACAGTGGCCTGGAAGGCAGATAGCAGCCCCGTCAAGGCGGGA |
| | | GTGGAGACCACCACACCCTCCAAACAAAGCAACAACAAGTACGCGGCCAGC |
| | | AGCTACCTGAGCCTGACGCCTGAGCAGTGGAAGTCCCACAGAAGCTACAGC |
| | | TGCCAGGTCACGCATGAAGGGAGCACCGTGGAGAAGACAGTGGCCCCTACA |
| | | GAATGTTCATGAGCGGCCGCTCGAGGCCGGCAAGGCCGGATCCCCCGACCT |
| | | CGACCTCTGGCTAATAAAGGAAATTTATTTTCATTGCAATAGTGTGTTGGA |
| | | ATTTTTTGTGTCTCTCACTCGGAAGGACATATGGGAGGGCAAATCATTTGG |
| | | TCGAGATCCCTCGGAGATCTCTAGCTAGAGGATCGATCCCCGCCCCGGACG |
| | | AACTAAACCTGACTACGACATCTCTGCCCCTTCTTCGCGGGGCAGTGCATG |
| | | TAATCCCTTCAGTTGGTTGGTACAACTTGCCAACTGGGCCCTGTTCCACAT |
| | | GTGACACGGGGGGGGACCAAACACAAAGGGGTTCTCTGACTGTAGTTGACA |
| | | TCCTTATAAATGGATGTGCACATTTGCCAACACTGAGTGGCTTTCATCCTG |
| | | GAGCAGACTTTGCAGTCTGTGGACTGCAACACAACATTGCCTTTATGTGTA |
| | | ACTCTTGGCTGAAGCTCTTACACCAATGCTGGGGGACATGTACCTCCCAGG |
| | | GGCCCAGGAAGACTACGGGAGGCTACACCAACGTCAATCAGAGGGGCCTGT |
| | | GTAGCTACCGATAAGCGGACCCTCAAGAGGGCATTAGCAATAGTGTTTATA |
| | | AGGCCCCCTTGTTAACCCTAAACGGGTAGCATATGCTTCCCGGGTAGTAGT |
| | | ATATACTATCCAGACTAACCCTAATTCAATAGCATATGTTACCCAACGGGA |
| | | AGCATATGCTATCGAATTAGGGTTAGTAAAAGGGTCCTAAGGAACAGCGAT |
| | | ATCTCCCACCCCATGAGCTGTCACGGTTTTATTTACATGGGGTCAGGATTC |
| | | CACGAGGGTAGTGAACCATTTTAGTCACAAGGGCAGTGGCTGAAGATCAAG |
| | | GAGCGGGCAGTGAACTCTCCTGAATCTTCGCCTGCTTCTTCATTCTCCTTC |
| | | GTTTAGCTAATAGAATAACTGCTGAGTTGTGAACAGTAAGGTGTATGTGAG |
| | | GTGCTCGAAAACAAGGTTTCAGGTGACGCCCCCAGAATAAAATTTGGACGG |
| | | GGGGTTCAGTGGTGGCATTGTGCTATGACACCAATATAACCCTCACAAACC |
| | | CCTTGGGCAATAAATACTAGTGTAGGAATGAAACATTCTGAATATCTTTAA |
| | | CAATAGAAATCCATGGGGTGGGGACAAGCCGTAAAGACTGGATGTCCATCT |
| | | CACACGAATTTATGGCTATGGGCAACACATAATCCTAGTGCAATATGATAC |
| | | TGGGGTTATTAAGATGTGTCCCAGGCAGGGACCAAGACAGGTGAACCATGT |
| | | TGTTACACTCTATTTGTAACAAGGGGAAAGAGAGTGGACGCCGACAGCAGC |
| | | GGACTCCACTGGTTGTCTCTAACACCCCCGAAAATTAAACGGGGCTCCACG |
| | | CCAATGGGGCCCATAAACAAAGACAAGTGGCCACTCTTTTTTTTGAAATTG |
| | | TGGAGTGGGGGCACGCGTCAGCCCCCACACGCCGCCCTGCGGTTTTGGACT |
| | | GTAAAATAAGGGTGTAATAACTTGGCTGATTGTAACCCCGCTAACCACTGC |
| | | GGTCAAACCACTTGCCCACAAAACCACTAATGGCACCCCGGGGAATACCTG |
| | | CATAAGTAGGTGGGCGGGCCAAGATAGGGGCGCGATTGCTGCGATCTGGAG |
| | | GACAAATTACACACACTTGCGCCTGAGCGCCAAGCACAGGGTTGTTGGTCC |
| | | TCATATTCACGAGGTCGCTGAGAGCACGGTGGGCTAATGTTGCCATGGGTA |
| | | GCATATACTACCCAAATATCTGGATAGCATATGCTATCCTAATCTATATCT |
| | | GGGTAGCATAGGCTATCCTAATCTATATCTGGGTAGCATATGCTATCCTAA |
| | | TCTATATCTGGGTAGTATATGCTATCCTAATTTATATCTGGGTAGCATAGG |
| | | CTATCCTAATCTATATCTGGGTAGCATATGCTATCCTAATCTATATCTGGG |
| | | TAGTATATGCTATCCTAATCTGTATCCGGGTAGCATATGCTATCCTAATAG |
| | | AGATTAGGGTAGTATATGCTATCCTAATTTATATCTGGGTAGCATATACTA |
| | | CCCAAATATCTGGATAGCATATGCTATCCTAATCTATATCTGGGTAGCATA |
| | | TGCTATCCTAATCTATATCTGGGTAGCATAGGCTATCCTAATCTATATCTG |
| | | GGTAGCATATGCTATCCTAATCTATATCTGGGTAGTATATGCTATCCTAAT |
| | | TTATATCTGGGTAGCATAGGCTATCCTAATCTATATCTGGGTAGCATATGC |
| | | TATCCTAATCTATATCTGGGTAGTATATGCTATCCTAATCTGTATCCGGGT |
| | | AGCATATGCTATCCTCATGATAAGCTGTCAAACATGAGAATTTTCTTGAAG |
| | | ACGAAAGGGCCTCGTGATACGCCTATTTTTATAGGTTAATGTCATGATAAT |
| | | AATGGTTTCTTAGACGTCAGGTGGCACTTTTCGGGGAAATGTGCGCGGAAC |
| | | CCCTATTTGTTTATTTTTCTAAATACATTCAAATATGTATCCGCTCATGAG |
| | | ACAATAACCCTGATAAATGCTTCAATAATATTGAAAAAGGAAGAGTATGAG |
| | | TATTCAACATTTCCGTGTCGCCCTTATTCCCTTTTTTGCGGCATTTTGCCT |
| | | TCCTGTTTTTGCTCACCCAGAAACGCTGGTGAAAGTAAAAGATGCTGAAGA |
| | | TCAGTTGGGTGCACGAGTGGGTTACATCGAACTGGATCTCAACAGCGGTAA |
| | | GATCCTTGAGAGTTTTCGCCCCGAAGAACGTTTTCCAATGATGAGCACTTT |
| | | TAAAGTTCTGCTATGTGGCGCGGTATTATCCCGTGTTGACGCCGGGCAAGA |
| | | GCAACTCGGTCGCCGCATACACTATTCTCAGAATGACTTGGTTGAGTACTC |
| | | ACCAGTCACAGAAAAGCATCTTACGGATGGCATGACAGTAAGAGAATTATG |
| | | CAGTGCTGCCATAACCATGAGTGATAACACTGCGGCCAACTTACTTCTGAC |
| | | AACGATCGGAGGACCGAAGGAGCTAACCGCTTTTTTGCACAACATGGGGGA |
| | | TCATGTAACTCGCCTTGATCGTTGGGAACCGGAGCTGAATGAAGCCATACC |
| | | AAACGACGAGCGTGACACCACGATGCCTGCAGCAATGGCAACAACGTTGCG |
| | | CAAACTATTAACTGGCGAACTACTTACTCTAGCTTCCCGGCAACAATTAAT |
| | | AGACTGGATGGAGGCGGATAAAGTTGCAGGACCACTTCTGCGCTCGGCCCT |
| | | TCCGGCTGGCTGGTTTATTGCTGATAAATCTGGAGCCGGTGAGCGTGGGTC |
| | | TCGCGGTATCATTGCAGCACTGGGGCCAGATGGTAAGCCCTCCCGTATCGT |
| | | AGTTATCTACACGACGGGGAGTCAGGCAACTATGGATGAACGAAATAGACA |
| | | GATCGCTGAGATAGGTGCCTCACTGATTAAGCATTGGTAACTGTCAGACCA |
| | | AGTTTACTCATATATACTTTAGATTGATTTAAAACTTCATTTTTAATTTAA |
| | | AAGGATCTAGGTGAAGATCCTTTTTGATAATCTCATGACCAAAATCCCTTA |
| | | ACGTGAGTTTTCGTTCCACTGAGCGTCAGACCCCGTAGAAAAGATCAAAGG |
| | | ATCTTCTTGAGATCCTTTTTTTCTGCGCGTAATCTGCTGCTTGCAAACAAA |
| | | AAAACCACCGCTACCAGCGGTGGTTTGTTTGCCGGATCAAGAGCTACCAAC |
| | | TCTTTTTCCGAAGGTAACTGGCTTCAGCAGAGCGCAGATACCAAATACTGT |
| | | TCTTCTAGTGTAGCCGTAGTTAGGCCACCACTTCAAGAACTCTGTAGCACC |
| | | GCCTACATACCTCGCTCTGCTAATCCTGTTACCAGTGGCTGCTGCCAGTGG |
| | | CGATAAGTCGTGTCTTACCGGGTTGGACTCAAGACGATAGTTACCGGATAA |
| | | GGCGCAGCGGTCGGGCTGAACGGGGGGTTCGTGCACACAGCCCAGCTTGGA |
| | | GCGAACGACCTACACCGAACTGAGATACCTACAGCGTGAGCTATGAGAAAG |
| | | CGCCACGCTTCCCGAAGGGAGAAAGGCGGACAGGTATCCGGTAAGCGGCAG |
| | | GGTCGGAACAGGAGAGCGCACGAGGGAGCTTCCAGGGGGAAACGCCTGGTA |
| | | TCTTTATAGTCCTGTCGGGTTTCGCCACCTCTGACTTGAGCGTCGATTTTT |
| | | GTGATGCTCGTCAGGGGGGCGGAGCCTATGGAAAAACGCCAGCAACGCGGC |
| | | CTTTTTACGGTTCCTGGCCTTTTGCTGGCCTTTTGCTCACATGTTCTTTCC |
| | | TGCGTTATCCCCTGATTCTGTGGATAACCGTATTACCGCCTTTGAGTGAGC |
| | | TGATACCGCTCGCCGCAGCCGAACGACCGAGCGCAGCGAGTCAGTGAGCGA |
| | | GGAAGCGGAAGAGCGCCCAATACGCAAACCGCCTCTCCCCGCGCGTTGGCC |
| | | GATTCATTAATGCAGCTGGCACGACAGGTTTCCCGACTGGAAAGCGGGCAG |
| | | TGAGCGCAACGCAATTAATGTGAGTTAGCTCACTCATTAGGCACCCCAGGC |
| | | TTTACACTTTATGCTTCCGGCTCGTATGTTGTGTGGAATTGTGAGCGGATA |
| | | ACAATTTCACACAGGAAACAGCTATGACCATGATTACGCCAAGCTCTAGCT |
| | | AGAGGTCGAGTCCCTCCCCAGCAGGCAGAAGTATGCAAAGCATGCATCTCA |
| | | ATTAGTCAGCAACCATAGTCCCGCCCCTAACTCCGCCCATCCCGCCCCTAA |
| | | CTCCGCCCAGTTCCGCCCATTCTCCGCCCCATGGCTGACTAATTTTTTTTA |
| | | TTTATGCAGAGGCCGAGGCCGCCTCGGCCTCTGAGCTATTCCAGAAGTAGT |
| | | GAGGAGGCTTTTTTGGAGGCCTAGGCTTTTGCAAAAAGCTTTGCAAAGATG |
| | | GATAAAGTTTTAAACAGAGAGGAATCTTTGCAGCTAATGGACCTTCTAGGT |
| | | CTTGAAAGGAGTGGGAATTGGCTCCGGTGCCCGTCAGTGGGCAGAGCGCAC |
| | | ATCGCCCACAGTCCCCGAGAAGTTGGGGGGAGGGGTCGGCAATTGAACCGG |
| | | TGCCTAGAGAAGGTGGCGCGGGGTAAACTGGGAAAGTGATGTCGTGTACTG |
| | | GCTCCGCCTTTTTCCCGAGGGTGGGGGAGAACCGTATATAAGTGCAGTAGT |
| | | CGCCGTGAACGTTCTTTTTCGCAACGGGTTTGCCGCCAGAACACAGGTAAG |
| | | TGCCGTGTGTGGTTCCCGCGGGCCTGGCCTCTTTACGGGTTATGGCCCTTG |
| | | CGTGCCTTGAATTACTTCCACCTGGCTGCAGTACGTGATTCTTGATCCCGA |
| | | GCTTCGGGTTGGAAGTGGGTGGGAGAGTTCGAGGCCTTGCGCTTAAGGAGC |
| | | CCCTTCGCCTCGTGCTTGAGTTGAGGCCTGGCCTGGGCGCTGGGGCCGCCG |
| | | CGTGCGAATCTGGTGGCACCTTCGCGCCTGTCTCGCTGCTTTCGATAAGTC |
| | | TCTAGCCATTTAAAATTTTTGATGACCTGCTGCGACGCTTTTTTTCTGGCA |
| | | AGATAGTCTTGTAAATGCGGGCCAAGATCTGCACACTGGTATTTCGGTTTT |
| | | TGGGGCCGCGGGCGGCGACGGGGCCCGTGCGTCCCAGCGCACATGTTCGGC |
| | | GAGGCGGGGCCTGCGAGCGCGGCCACCGAGAATCGGACGGGGGTAGTCTCA |
| | | AGCTGGCCGGCCTGCTCTGGTGCCTGGCCTCGCGCCGCCGTGTATCGCCCC |
| | | GCCCTGGGCGGCAAGGCTGGCCCGGTCGGCACCAGTTGCGTGAGCGGAAAG |
| | | ATGGCCGCTTCCCGGCCCTGCTGCAGGGAGCTCAAAATGGAGGACGCGGCG |
| | | CTCGGGAGAGCGGGCGGGTGAGTCACCCACACAAAGGAAAAGGGCCTTTCC |
| | | GTCCTCAGCCGTCGCTTCATGTGACTCCACGGAGTACCGGGCGCCGTCCAG |
| | | GCACCTCGATTAGTTCTCGAGCTTTTGGAGTACGTCGTCTTTAGGTTGGGG |
| | | GGAGGGGTTTTATGCGATGGAGTTTCCCCACACTGAGTGGGTGGAGACTGA |
| | | AGTTAGGCCAGCTTGGCACTTGATGTAATTCTCCTTGGAATTTGCCCTTTT |
| | | TGAGTTTGGATCTTGGTTCATTCTCAAGCCTCAGACAGTGGTTCAAAGTTT |
| | | TTTTCTTCCATTTCAGGTGTCGTGAGGAATTCTCTAGAGATCCCTCGACCT |
| | | CGAGATCCATTGTGCCCGGGCGCCACCATGGACATGCGCGTGCCCGCCCAG |
| | | CTGCTGGGCCTGCTGCTGCTGTGGTTCCCCGGCTCGCGATGC |
| V7 | 935 | GCGTCGACCAAGGGCCCATCGGTCTTCCCCCTGGCACCCTCCTCCAAGAGC |
| | | ACCTCTGGGGGCACAGCGGCCCTGGGCTGCCTGGTCAAGGACTACTTCCCC |
| | | GAACCGGTGACGGTGTCGTGGAACTCAGGCGCCCTGACCAGCGGCGTGCAC |
| | | ACCTTCCCGGCTGTCCTACAGTCCTCAGGACTCTACTCCCTCAGCAGCGTG |
| | | GTGACCGTGCCCTCCAGCAGCTTGGGCACCCAGACCTACATCTGCAACGTG |
| | | AATCACAAGCCCAGCAACACCAAGGTGGACAAGAAAGTTGAGCCCAAATCT |
| | | TGTGACAAAACTCACACATGCCCACCGTGCCCAGCACCTGAAGCCGCGGGG |
| | | GGACCGTCAGTCTTCCTCTTCCCCCCAAAACCCAAGGACACCCTCATGATC |
| | | TCCCGGACCCCTGAGGTCACATGCGTGGTGGTGGACGTGAGCCACGAAGAC |
| | | CCTGAGGTCAAGTTCAACTGGTACGTGGACGGCGTGGAGGTGCATAATGCC |
| | | AAGACAAAGCCGCGGGAGGAGCAGTACAACAGCACGTACCGTGTGGTCAGC |
| | | GTCCTCACCGTCCTGCACCAGGACTGGCTGAATGGCAAGGAGTACAAGTGC |
| | | AAGGTCTCCAACAAAGCCCTCCCAGCCCCCATCGAGAAAACCATCTCCAAA |
| | | GCCAAAGGGCAGCCCCGAGAACCACAGGTGTACACCCTGCCCCCATCCCGC |
| | | GAGGAGATGACCAAGAACCAGGTCAGCCTGACCTGCCTGGTCAAAGGCTTC |
| | | TATCCCAGCGACATCGCCGTGGAGTGGGAGAGCAATGGGCAGCCGGAGAAC |
| | | AACTACAAGACCACGCCTCCCGTGCTGGACTCCGACGGCTCCTTCTTCCTC |
| | | TACAGCAAGCTCACCGTGGACAAGAGCAGGTGGCAGCAGGGGAACGTCTTC |
| | | TCATGCTCCGTGATGCATGAGGCTCTGCACAACCACTACACGCAGAAGAGC |
| | | CTCTCCCTGTCTCCGGGTAAATGAGCGGCCGCTCGAGGCCGGCAAGGCCGG |
| | | ATCCCCCGACCTCGACCTCTGGCTAATAAAGGAAATTTATTTTCATTGCAA |
| | | TAGTGTGTTGGAATTTTTTGTGTCTCTCACTCGGAAGGACATATGGGAGGG |
| | | CAAATCATTTGGTCGAGATCCCTCGGAGATCTCTAGCTAGAGGATCGATCC |
| | | CCGCCCCGGACGAACTAAACCTGACTACGACATCTCTGCCCCTTCTTCGCG |
| | | GGGCAGTGCATGTAATCCCTTCAGTTGGTTGGTACAACTTGCCAACTGGGC |
| | | CCTGTTCCACATGTGACACGGGGGGGGACCAAACACAAAGGGGTTCTCTGA |
| | | CTGTAGTTGACATCCTTATAAATGGATGTGCACATTTGCCAACACTGAGTG |
| | | GCTTTCATCCTGGAGCAGACTTTGCAGTCTGTGGACTGCAACACAACATTG |
| | | CCTTTATGTGTAACTCTTGGCTGAAGCTCTTACACCAATGCTGGGGGACAT |
| | | GTACCTCCCAGGGGCCCAGGAAGACTACGGGAGGCTACACCAACGTCAATC |
| | | AGAGGGGCCTGTGTAGCTACCGATAAGCGGACCCTCAAGAGGGCATTAGCA |
| | | ATAGTGTTTATAAGGCCCCCTTGTTAACCCTAAACGGGTAGCATATGCTTC |
| | | CCGGGTAGTAGTATATACTATCCAGACTAACCCTAATTCAATAGCATATGT |
| | | TACCCAACGGGAAGCATATGCTATCGAATTAGGGTTAGTAAAAGGGTCCTA |
| | | AGGAACAGCGATATCTCCCACCCCATGAGCTGTCACGGTTTTATTTACATG |
| | | GGGTCAGGATTCCACGAGGGTAGTGAACCATTTTAGTCACAAGGGCAGTGG |
| | | CTGAAGATCAAGGAGCGGGCAGTGAACTCTCCTGAATCTTCGCCTGCTTCT |
| | | TCATTCTCCTTCGTTTAGCTAATAGAATAACTGCTGAGTTGTGAACAGTAA |
| | | GGTGTATGTGAGGTGCTCGAAAACAAGGTTTCAGGTGACGCCCCCAGAATA |
| | | AAATTTGGACGGGGGGTTCAGTGGTGGCATTGTGCTATGACACCAATATAA |
| | | CCCTCACAAACCCCTTGGGCAATAAATACTAGTGTAGGAATGAAACATTCT |
| | | GAATATCTTTAACAATAGAAATCCATGGGGTGGGGACAAGCCGTAAAGACT |
| | | GGATGTCCATCTCACACGAATTTATGGCTATGGGCAACACATAATCCTAGT |
| | | GCAATATGATACTGGGGTTATTAAGATGTGTCCCAGGCAGGGACCAAGACA |
| | | GGTGAACCATGTTGTTACACTCTATTTGTAACAAGGGGAAAGAGAGTGGAC |
| | | GCCGACAGCAGCGGACTCCACTGGTTGTCTCTAACACCCCCGAAAATTAAA |
| | | CGGGGCTCCACGCCAATGGGGCCCATAAACAAAGACAAGTGGCCACTCTTT |
| | | TTTTTGAAATTGTGGAGTGGGGGCACGCGTCAGCCCCCACACGCCGCCCTG |
| | | CGGTTTTGGACTGTAAAATAAGGGTGTAATAACTTGGCTGATTGTAACCCC |
| | | GCTAACCACTGCGGTCAAACCACTTGCCCACAAAACCACTAATGGCACCCC |
| | | GGGGAATACCTGCATAAGTAGGTGGGCGGGCCAAGATAGGGGCGCGATTGC |
| | | TGCGATCTGGAGGACAAATTACACACACTTGCGCCTGAGCGCCAAGCACAG |
| | | GGTTGTTGGTCCTCATATTCACGAGGTCGCTGAGAGCACGGTGGGCTAATG |
| | | TTGCCATGGGTAGCATATACTACCCAAATATCTGGATAGCATATGCTATCC |
| | | TAATCTATATCTGGGTAGCATAGGCTATCCTAATCTATATCTGGGTAGCAT |
| | | ATGCTATCCTAATCTATATCTGGGTAGTATATGCTATCCTAATTTATATCT |
| | | GGGTAGCATAGGCTATCCTAATCTATATCTGGGTAGCATATGCTATCCTAA |
| | | TCTATATCTGGGTAGTATATGCTATCCTAATCTGTATCCGGGTAGCATATG |
| | | CTATCCTAATAGAGATTAGGGTAGTATATGCTATCCTAATTTATATCTGGG |
| | | TAGCATATACTACCCAAATATCTGGATAGCATATGCTATCCTAATCTATAT |
| | | CTGGGTAGCATATGCTATCCTAATCTATATCTGGGTAGCATAGGCTATCCT |
| | | AATCTATATCTGGGTAGCATATGCTATCCTAATCTATATCTGGGTAGTATA |
| | | TGCTATCCTAATTTATATCTGGGTAGCATAGGCTATCCTAATCTATATCTG |
| | | GGTAGCATATGCTATCCTAATCTATATCTGGGTAGTATATGCTATCCTAAT |
| | | CTGTATCCGGGTAGCATATGCTATCCTCATGATAAGCTGTCAAACATGAGA |
| | | ATTTTCTTGAAGACGAAAGGGCCTCGTGATACGCCTATTTTTATAGGTTAA |
| | | TGTCATGATAATAATGGTTTCTTAGACGTCAGGTGGCACTTTTCGGGGAAA |
| | | TGTGCGCGGAACCCCTATTTGTTTATTTTTCTAAATACATTCAAATATGTA |
| | | TCCGCTCATGAGACAATAACCCTGATAAATGCTTCAATAATATTGAAAAAG |
| | | GAAGAGTATGAGTATTCAACATTTCCGTGTCGCCCTTATTCCCTTTTTTGC |
| | | GGCATTTTGCCTTCCTGTTTTTGCTCACCCAGAAACGCTGGTGAAAGTAAA |
| | | AGATGCTGAAGATCAGTTGGGTGCACGAGTGGGTTACATCGAACTGGATCT |
| | | CAACAGCGGTAAGATCCTTGAGAGTTTTCGCCCCGAAGAACGTTTTCCAAT |
| | | GATGAGCACTTTTAAAGTTCTGCTATGTGGCGCGGTATTATCCCGTGTTGA |
| | | CGCCGGGCAAGAGCAACTCGGTCGCCGCATACACTATTCTCAGAATGACTT |
| | | GGTTGAGTACTCACCAGTCACAGAAAAGCATCTTACGGATGGCATGACAGT |
| | | AAGAGAATTATGCAGTGCTGCCATAACCATGAGTGATAACACTGCGGCCAA |
| | | CTTACTTCTGACAACGATCGGAGGACCGAAGGAGCTAACCGCTTTTTTGCA |
| | | CAACATGGGGGATCATGTAACTCGCCTTGATCGTTGGGAACCGGAGCTGAA |
| | | TGAAGCCATACCAAACGACGAGCGTGACACCACGATGCCTGCAGCAATGGC |
| | | AACAACGTTGCGCAAACTATTAACTGGCGAACTACTTACTCTAGCTTCCCG |
| | | GCAACAATTAATAGACTGGATGGAGGCGGATAAAGTTGCAGGACCACTTCT |
| | | GCGCTCGGCCCTTCCGGCTGGCTGGTTTATTGCTGATAAATCTGGAGCCGG |
| | | TGAGCGTGGGTCTCGCGGTATCATTGCAGCACTGGGGCCAGATGGTAAGCC |
| | | CTCCCGTATCGTAGTTATCTACACGACGGGGAGTCAGGCAACTATGGATGA |
| | | ACGAAATAGACAGATCGCTGAGATAGGTGCCTCACTGATTAAGCATTGGTA |
| | | ACTGTCAGACCAAGTTTACTCATATATACTTTAGATTGATTTAAAACTTCA |
| | | TTTTTAATTTAAAAGGATCTAGGTGAAGATCCTTTTTGATAATCTCATGAC |
| | | CAAAATCCCTTAACGTGAGTTTTCGTTCCACTGAGCGTCAGACCCCGTAGA |
| | | AAAGATCAAAGGATCTTCTTGAGATCCTTTTTTTCTGCGCGTAATCTGCTG |
| | | CTTGCAAACAAAAAAACCACCGCTACCAGCGGTGGTTTGTTTGCCGGATCA |
| | | AGAGCTACCAACTCTTTTTCCGAAGGTAACTGGCTTCAGCAGAGCGCAGAT |
| | | ACCAAATACTGTTCTTCTAGTGTAGCCGTAGTTAGGCCACCACTTCAAGAA |
| | | CTCTGTAGCACCGCCTACATACCTCGCTCTGCTAATCCTGTTACCAGTGGC |
| | | TGCTGCCAGTGGCGATAAGTCGTGTCTTACCGGGTTGGACTCAAGACGATA |
| | | GTTACCGGATAAGGCGCAGCGGTCGGGCTGAACGGGGGGTTCGTGCACACA |
| | | GCCCAGCTTGGAGCGAACGACCTACACCGAACTGAGATACCTACAGCGTGA |
| | | GCTATGAGAAAGCGCCACGCTTCCCGAAGGGAGAAAGGCGGACAGGTATCC |
| | | GGTAAGCGGCAGGGTCGGAACAGGAGAGCGCACGAGGGAGCTTCCAGGGGG |
| | | AAACGCCTGGTATCTTTATAGTCCTGTCGGGTTTCGCCACCTCTGACTTGA |
| | | GCGTCGATTTTTGTGATGCTCGTCAGGGGGGCGGAGCCTATGGAAAAACGC |
| | | CAGCAACGCGGCCTTTTTACGGTTCCTGGCCTTTTGCTGGCCTTTTGCTCA |
| | | CATGTTCTTTCCTGCGTTATCCCCTGATTCTGTGGATAACCGTATTACCGC |
| | | CTTTGAGTGAGCTGATACCGCTCGCCGCAGCCGAACGACCGAGCGCAGCGA |
| | | GTCAGTGAGCGAGGAAGCGGAAGAGCGCCCAATACGCAAACCGCCTCTCCC |
| | | CGCGCGTTGGCCGATTCATTAATGCAGCTGGCACGACAGGTTTCCCGACTG |
| | | GAAAGCGGGCAGTGAGCGCAACGCAATTAATGTGAGTTAGCTCACTCATTA |
| | | GGCACCCCAGGCTTTACACTTTATGCTTCCGGCTCGTATGTTGTGTGGAAT |
| | | TGTGAGCGGATAACAATTTCACACAGGAAACAGCTATGACCATGATTACGC |
| | | CAAGCTCTAGCTAGAGGTCGAGTCCCTCCCCAGCAGGCAGAAGTATGCAAA |
| | | GCATGCATCTCAATTAGTCAGCAACCATAGTCCCGCCCCTAACTCCGCCCA |
| | | TCCCGCCCCTAACTCCGCCCAGTTCCGCCCATTCTCCGCCCCATGGCTGAC |
| | | TAATTTTTTTTATTTATGCAGAGGCCGAGGCCGCCTCGGCCTCTGAGCTAT |
| | | TCCAGAAGTAGTGAGGAGGCTTTTTTGGAGGCCTAGGCTTTTGCAAAAAGC |
| | | TTTGCAAAGATGGATAAAGTTTTAAACAGAGAGGAATCTTTGCAGCTAATG |
| | | GACCTTCTAGGTCTTGAAAGGAGTGGGAATTGGCTCCGGTGCCCGTCAGTG |
| | | GGCAGAGCGCACATCGCCCACAGTCCCCGAGAAGTTGGGGGGAGGGGTCGG |
| | | CAATTGAACCGGTGCCTAGAGAAGGTGGCGCGGGGTAAACTGGGAAAGTGA |
| | | TGTCGTGTACTGGCTCCGCCTTTTTCCCGAGGGTGGGGGAGAACCGTATAT |
| | | AAGTGCAGTAGTCGCCGTGAACGTTCTTTTTCGCAACGGGTTTGCCGCCAG |
| | | AACACAGGTAAGTGCCGTGTGTGGTTCCCGCGGGCCTGGCCTCTTTACGGG |
| | | TTATGGCCCTTGCGTGCCTTGAATTACTTCCACCTGGCTGCAGTACGTGAT |
| | | TCTTGATCCCGAGCTTCGGGTTGGAAGTGGGTGGGAGAGTTCGAGGCCTTG |
| | | CGCTTAAGGAGCCCCTTCGCCTCGTGCTTGAGTTGAGGCCTGGCCTGGGCG |
| | | CTGGGGCCGCCGCGTGCGAATCTGGTGGCACCTTCGCGCCTGTCTCGCTGC |
| | | TTTCGATAAGTCTCTAGCCATTTAAAATTTTTGATGACCTGCTGCGACGCT |
| | | TTTTTTCTGGCAAGATAGTCTTGTAAATGCGGGCCAAGATCTGCACACTGG |
| | | TATTTCGGTTTTTGGGGCCGCGGGCGGCGACGGGGCCCGTGCGTCCCAGCG |
| | | CACATGTTCGGCGAGGCGGGGCCTGCGAGCGCGGCCACCGAGAATCGGACG |
| | | GGGGTAGTCTCAAGCTGGCCGGCCTGCTCTGGTGCCTGGCCTCGCGCCGCC |
| | | GTGTATCGCCCCGCCCTGGGCGGCAAGGCTGGCCCGGTCGGCACCAGTTGC |
| | | GTGAGCGGAAAGATGGCCGCTTCCCGGCCCTGCTGCAGGGAGCTCAAAATG |
| | | GAGGACGCGGCGCTCGGGAGAGCGGGCGGGTGAGTCACCCACACAAAGGAA |
| | | AAGGGCCTTTCCGTCCTCAGCCGTCGCTTCATGTGACTCCACGGAGTACCG |
| | | GGCGCCGTCCAGGCACCTCGATTAGTTCTCGAGCTTTTGGAGTACGTCGTC |
| | | TTTAGGTTGGGGGGAGGGGTTTTATGCGATGGAGTTTCCCCACACTGAGTG |
| | | GGTGGAGACTGAAGTTAGGCCAGCTTGGCACTTGATGTAATTCTCCTTGGA |
| | | ATTTGCCCTTTTTGAGTTTGGATCTTGGTTCATTCTCAAGCCTCAGACAGT |
| | | GGTTCAAAGTTTTTTTCTTCCATTTCAGGTGTCGTGAGGAATTCTCTAGAG |
| | | ATCCCTCGACCTCGAGATCCATTGTGCCCGGGCGCCACCATGGAGTTTGGG |
| | | CTGAGCTGGCTTTTTCTTGTCGCGATTTTAAAAGGTGTCCAGTGC |

[1016] The present invention incorporates by reference in their entirety techniques well known in the field of molecular biology and drug delivery. These techniques include, but are not limited to, techniques described in the following publications:
[1017] Ausubel et al. (eds.), Current Protocols in Molecular Biology, John Wiley &Sons, NY (1993);
[1018] Ausubel, F. M. et al. eds., Short Protocols In Molecular Biology (4th Ed. 1999) John Wiley & Sons, NY. (ISBN 0-471-32938-X).
[1019] Controlled Drug Bioavailability, Drug Product Design and Performance, Smolen and Ball (eds.), Wiley, New York (1984);
[1020] Giege, R. and Ducruix, A. Barrett, Crystallization of Nucleic Acids and Proteins, a Practical Approach, 2nd ea., pp. 20 1-16, Oxford University Press, New York, N.Y., (1999);
[1021] Goodson, in Medical Applications of Controlled Release, vol. 2, pp. 115-138 (1984);
[1022] Hammerling, et al., in: Monoclonal Antibodies and T-Cell Hybridomas 563-681 (Elsevier, N.Y., 1981;
[1023] Harlow et al., Antibodies: A Laboratory Manual, (Cold Spring Harbor Laboratory Press, 2nd ed. 1988);
[1024] Kabat et al., Sequences of Proteins of Immunological Interest (National Institutes of Health, Bethesda, Md. (1987) and (1991);
[1025] Kabat, E. A., et al. (1991) Sequences of Proteins of Immunological Interest, Fifth Edition, U.S. Department of Health and Human Services, NIH Publication No. 91-3242;
[1026] Kontermann and Dubel eds., Antibody Engineering (2001) Springer-Verlag. New York. 790 pp. (ISBN 3-540-41354-5).
[1027] Kriegler, Gene Transfer and Expression, A Laboratory Manual, Stockton Press, NY (1990);
[1028] Lu and Weiner eds., Cloning and Expression Vectors for Gene Function Analysis (2001) BioTechniques Press. Westborough, Mass. 298 pp. (ISBN 1-881299-21-X).
[1029] Medical Applications of Controlled Release, Langer and Wise (eds.), CRC Pres., Boca Raton, Fla. (1974);
[1030] Old, R. W. & S. B. Primrose, Principles of Gene Manipulation: An Introduction To Genetic Engineering (3d Ed. 1985) Blackwell Scientific Publications, Boston. Studies in Microbiology; V.2:409 pp. (ISBN 0-632-01318-4).
[1031] Sambrook, J. et al. eds., Molecular Cloning: A Laboratory Manual (2d Ed. 1989) Cold Spring Harbor Laboratory Press, NY. Vols. 1-3. (ISBN 0-87969-309-6).
[1032] Sustained and Controlled Release Drug Delivery Systems, J. R. Robinson, ed., Marcel Dekker, Inc., New York, 1978
[1033] Winnacker, E. L. From Genes To Clones: Introduction To Gene Technology (1987) VCH Publishers, NY (translated by Horst Ibelgaufts). 634 pp. (ISBN 0-89573-614-4).

### Incorporation by Reference

[1034] The contents of all cited references (including literature references, patents, patent applications, and websites) that maybe cited throughout this application are hereby expressly incorporated by reference in their entirety, as are the references cited therein. The practice of the present invention will employ, unless otherwise indicated, conventional techniques of immunology, molecular biology and cell biology, which are well known in the art.

### EQUIVALENTS

[1035] The invention may be embodied in other specific forms without departing from the spirit or essential characteristics thereof. The foregoing embodiments are therefore to be considered in all respects illustrative rather than limiting of the invention described herein. Scope of the invention is thus indicated by the appended claims rather than by the foregoing description, and all changes that come within the meaning and range of equivalency of the claims are therefore intended to be embraced herein.

We claim:

1. A binding protein comprising a polypeptide chain, wherein said polypeptide chain comprises VD1-(X1)n-VD2-C-(X2)n, wherein;
VD1 is a first heavy chain variable domain;
VD2 is a second heavy chain variable domain;
C is a heavy chain constant domain;
X1 is a linker with the proviso that it is not CH1;
X2 is an Fc region;
(X1)n is (X1)0 or (X1)1; and
(X2)n is (X2)0 or (X2)1;
wherein the binding protein is capable of binding a pair of antigens selected from the group consisting of CD-20 and CD-19; CD-20 and CD-80; CD-20 and CD-22; CD-20 and CD-40; CD-3 and HER-2; CD-3 and CD-19; EGFR and HER-2; EGFR and CD-3; EGFR and IGF1,2; EGFR and IGF1R; EGFR and RON; EGFR and HGF; EGFR and c-MET; HER-2 and IGF1,2; HER-2 and IGF1R; RON and HGF; VEGF and EGFR; VEGF and HER-2; VEGF and CD-20; VEGF and IGF1,2; VEGF and DLL4; VEGF and HGF; VEGF and RON; VEGF and NRP1; CD-20 and CD3; DLL-4 and PLGF; VEGF and PLGF; ErbB3 and EGFR; ErbB3 and HGF; HER-2 and ErbB3; c-Met and ErB3; PLGF and HER-2; and HER-2 and HER-2.

2. The binding protein according to claim 1, wherein VD1 and VD2 comprise an amino acid sequence selected from the group consisting of SEQ ID NOs: 28, 30, 32, 34, 36, 38, 40, 42, 44, 46, 48, 50, 52, 54, 56, 58, 60, 62, 64, 66, 68, 70, 72, 74, 76, 78, 80, 82, 84, 86, 88, 90, 92, 94, 96, 98, 100, 102, 104, and 106.

3. A binding protein comprising a polypeptide chain, wherein said polypeptide chain comprises VD1-(X1)n-VD2-C-(X2)n, wherein;
VD1 is a first light chain variable domain;
VD2 is a second light chain variable domain;
C is a light chain constant domain;
X1 is a linker with the proviso that it is not CH1;
X2 does not comprise an Fc region;
(X1)n is (X1)0 or (X1)1; and
(X2)n is (X2)0 or (X2)1;
wherein the binding protein is capable of binding a pair of antigens selected from the group consisting of CD-20 and CD-19; CD-20 and CD-80; CD-20 and CD-22; CD-20 and CD-40; CD-3 and HER-2; CD-3 and CD-19; EGFR and HER-2; EGFR and CD-3; EGFR and IGF1,2; EGFR and IGF1R; EGFR and RON; EGFR and HGF; EGFR and c-MET; HER-2 and IGF1,2; HER-2 and IGF1R; RON and HGF; VEGF and EGFR; VEGF and HER-2; VEGF and CD-20; VEGF and IGF1,2; VEGF and DLL4; VEGF and HGF; VEGF and RON; VEGF and NRP1; CD-20 and CD3; DLL-4 and PLGF; VEGF and PLGF; ErbB3 and EGFR; ErbB3 and HGF; HER-2 and ErbB3; c-Met and ErB3; PLGF and HER-2; and HER-2 and HER-2.

4. The binding protein according to claim 3, wherein the VD1 and VD2 light chain variable domains comprise an amino acid sequence selected from the group consisting of SEQ ID NOs: 29, 31, 33, 35, 37, 39, 41, 43, 45, 47, 49, 51, 53, 55, 57, 59, 61, 63, 65, 67, 69, 71, 73, 75, 77, 79, 81, 83, 85, 87, 89, 91, 93, 95, 97, 99, 101, 103, 105 and 107.

5. The binding protein according to claim 1 or 3, wherein n is 0.

6. A binding protein comprising first and second polypeptide chains, wherein said first polypeptide chain comprises a first VD1-(X1)n-VD2-C-(X2)n, wherein
VD1 is a first heavy chain variable domain;
VD2 is a second heavy chain variable domain;
C is a heavy chain constant domain;
X1 is a linker with the proviso that it is not CH1; and
X2 is an Fc region; and
wherein said second polypeptide chain comprises a second VD1-(X1)n-VD2-C—(X2)n, wherein
VD1 is a first light chain variable domain;
VD2 is a second light chain variable domain;
C is a light chain constant domain;
X1 is a linker with the proviso that it is not CH1;
X2 does not comprise an Fc region;
(X1)n is (X1)0 or (X1)1; and
(X2)n is (X2)0 or (X2)1, wherein the binding protein is capable of binding a pair of antigens selected from the group consisting of CD-20 and CD-19; CD-20 and CD-80; CD-20 and CD-22; CD-20 and CD-40; CD-3 and HER-2; CD-3 and CD-19; EGFR and HER-2; EGFR and CD-3; EGFR and IGF1,2; EGFR and IGF1R; EGFR and RON; EGFR and HGF; EGFR and c-MET; HER-2 and IGF1,2; HER-2 and IGF1R; RON and HGF; VEGF and EGFR; VEGF and HER-2; VEGF and CD-20; VEGF and IGF1,2; VEGF and DLL4; VEGF and HGF; VEGF and RON; VEGF and NRP1; CD-20 and CD3; DLL-4 and PLGF; VEGF and PLGF; ErbB3 and EGFR; ErbB3 and HGF; HER-2 and ErbB3; c-Met and ErB3; PLGF and HER-2; and HER-2 and HER-2.

7. The binding protein according to claim 6, wherein the VD1 and VD2 heavy chain variable domains comprise an amino acid sequence selected from the group consisting of SEQ ID NOs: 28, 30, 32, 34, 36, 38, 40, 42, 44, 46, 48, 50, 52, 54, 56, 58, 60, 62, 64, 66, 68, 70, 72, 74, 76, 78, 80, 82, 84, 86, 88, 90, 92, 94, 96, 98, 100, 102, 104, and 106 and wherein the VD1 and VD2 light chain variable domains comprise an amino acid sequence selected from the group consisting of SEQ ID NOs: 29, 31, 33, 35, 37, 39, 41, 43, 45, 47, 49, 51, 53, 55, 57, 59, 61, 63, 65, 67, 69, 71, 73, 75, 77, 79, 81, 83, 85, 87, 89, 91, 93, 95, 97, 99, 101, 103, 105 and 107.

8. The binding protein according to claim 1, 3, or 6, wherein X1 or X2 is an amino acid sequence selected from the group consisting of SEQ ID NOs 1-26.

9. The binding protein according to claim 6, wherein the binding protein comprises two first polypeptide chains and two second polypeptide chains.

10. The binding protein according to claim 1, 3, or 6, wherein the Fc region is selected from the group consisting of native sequence Fc region and a variant sequence Fc region.

11. The binding protein according to claim 10, wherein the Fc region is selected from the group consisting of an Fc region from an IgG1, IgG2, IgG3, IgG4, IgA, IgM, IgE, and IgD.

12. The binding protein according to claim 1, 3, or 6, wherein said VD1 of the first polypeptide chain and said VD1 of the second polypeptide chain are obtained from the same first and second parent antibody, respectively, or antigen binding portion thereof.

13. The binding protein according to claim 1, 3, or 6, wherein said VD1 of the first polypeptide chain and said VD1 of the second polypeptide chain are obtained from a different first and second parent antibody, respectively, or antigen binding portion thereof.

14. The binding protein according to claim 1, 3, or 6, wherein said VD2 of the first polypeptide chain and said VD2 of the second polypeptide chain are obtained from the same first and second parent antibody, respectively, or antigen binding portion thereof.

15. The binding protein according to claim 1, 3, or 6, wherein said VD2 of the first polypeptide chain and said VD2 of the second polypeptide chain are obtained from different first and second parent antibody, respectively, or antigen binding portion thereof.

16. The binding protein according to any one of claims 13-15, wherein said first and said second parent antibodies bind different epitopes on said antigen.

17. The binding protein according to any one of claims 13-15, wherein said first parent antibody or antigen binding portion thereof, binds said first antigen with a potency different from the potency with which said second parent antibody or antigen binding portion thereof, binds said second antigen.

18. The binding protein according to any one of claims 13-15, wherein said first parent antibody or antigen binding portion thereof, binds said first antigen with an affinity different from the affinity with which said second parent antibody or antigen binding portion thereof, binds said second antigen.

19. The binding protein according to any one of claims 13-15, wherein said first parent antibody or antigen binding portion thereof, and said second parent antibody or antigen binding portion thereof, are selected from the group consisting of a human antibody, a CDR grafted antibody, and a humanized antibody.

20. The binding protein according to any one of claims 13-15, wherein said first parent antibody or antigen binding portion thereof, and said second parent antibody or antigen binding portion thereof, are selected from the group consisting of a Fab fragment; a F(ab′)₂ fragment; a bivalent fragment comprising two Fab fragments linked by a disulfide bridge at the hinge region; a Fd fragment consisting of the VH and CH1 domains; a Fv fragment consisting of the VL and VH domains of a single arm of an antibody; a dAb fragment; an isolated complementarity determining region (CDR); a single chain antibody; and a diabody.

21. The binding protein according to claim 1, 3, or 6, wherein said binding protein possesses at least one desired property exhibited by said first parent antibody or antigen binding portion thereof, or said second parent antibody or antigen binding portion thereof.

22. The binding protein according to claim 22, wherein said desired property is selected from one or more antibody parameters.

23. The binding protein according to claim 21, wherein said antibody parameters are selected from the group consisting of antigen specificity, affinity to antigen, potency, biological function, epitope recognition, stability, solubility, production efficiency, immunogenicity, pharmacokinetics, bioavailability, tissue cross reactivity, and orthologous antigen binding.

24. A binding protein capable of binding two antigens comprising four polypeptide chains, wherein two polypeptide chains comprise VD1-(X1)n-VD2-C-(X2)n, wherein VD1 is a first heavy chain variable domain;
VD2 is a second heavy chain variable domain;
C is a heavy chain constant domain;
X1 is a linker with the proviso that it is not CH1; and
X2 is an Fc region; and
wherein two polypeptide chains comprise VD1-(X1)n-VD2-C-(X2)n, wherein
VD1 is a first light chain variable domain;
VD2 is a second light chain variable domain;
C is a light chain constant domain;
X1 is a linker with the proviso that it is not CH1;
X2 does not comprise an Fc region;
(X1)n is (X1)0 or (X1)1; and
(X2)n is (X2)0 or (X2)1; wherein the VD1 and VD2 heavy chain variable domains comprise an amino acid sequence selected from the group consisting of SEQ ID NOs: 28, 30, 32, 34, 36, 38, 40, 42, 44, 46, 48, 50, 52, 54, 56, 58, 60, 62, 64, 66, 68, 70, 72, 74, 76, 78, 80, 82, 84, 86, 88, 90, 92, 94, 96, 98, 100, 102, 104, and 106 and wherein the VD1 and VD2 light chain variable domains comprise an amino acid sequence selected from the group consisting of SEQ ID NOs:. 29, 31, 33, 35, 37, 39, 41, 43, 45, 47, 49, 51, 53, 55, 57, 59, 61, 63, 65, 67, 69, 71, 73, 75, 77, 79, 81, 83, 85, 87, 89, 91, 93, 95, 97, 99, 101, 103, 105 and 107.

25. A binding protein capable of binding two antigens comprising four polypeptide chains, wherein two polypeptide chains comprise VD1-(X1)n-VD2-C-(X2)n, wherein
VD1 is a first heavy chain variable domain;
VD2 is a second heavy chain variable domain;
C is a heavy chain constant domain;
X1 is a linker with the proviso that it is not CH1;
X2 is an Fc region;
(X1)n is (X1)0 or (X1)1; and
(X2)n is (X2)0 or (X2)1; and wherein two polypeptide chains comprise VD1-(X1)n-VD2-C-(X2)n, wherein VD1 is a first light chain variable domain;
VD2 is a second light chain variable domain;
C is a light chain constant domain;
X1 is a linker with the proviso that it is not CH1;
X2 does not comprise an Fc region;
(X1)n is (X1)0 or (X1)1; and
(X2)n is (X2)0 or (X2)1;
wherein the DVD-Ig binds at least one antigen selected from the group consisting of CD-20, CD-19, CD-80, CD-22, CD-40, CD-3, human epidermal growth factor receptor 2 (HER-2), epidermal growth factor receptor (EGFR), insulin-like growth factor 1,2 (IGF1,2), insulin-like growth factor receptor (IGF1R), macrophage stimulating protein receptor tyrosine kinase (RON), hepatocyte growth factor (HGF), mesenchymal-epithelial transition factor (c-MET), vascular endothelial growth factor (VEGF), Drosophila Delta homologue 4 (DLL4), neuropilin 1 (NRP1), placental growth factor (PLGF), and v-erb-b2 avian erythroblastic leukemia viral oncogene homolog 3 (ErbB3).

26. The binding protein according to claim 1, 3, 6, 24, or 25, wherein said binding protein has an on rate constant (Kon) to said one or more targets selected from the group consisting of: at least about 10²M⁻¹s⁻¹; at least about 10³M⁻¹s¹; at least about 10⁴M⁻¹s⁻¹; at least about 10⁵M⁻¹s⁻¹; and at least about 10⁶M⁻¹s⁻¹, as measured by surface plasmon resonance.

27. The binding protein according to claim 1, 3, 6, 24, or 25, wherein said binding protein has an off rate constant (Koff) to said one or more targets selected from the group consisting of: at most about 10⁻³s⁻¹; at most about 10⁻⁴s⁻¹; at most about 10⁻⁵s⁻¹; and at most about 10⁻⁶s⁻¹, as measured by surface plasmon resonance.

28. The binding protein according to claim 1, 3, 6, 24, or 25, wherein said binding protein has a dissociation constant (K_{D}) to said one or more targets selected from the group consisting of: at most about 10⁻⁷ M; at most about 10⁻⁸ M; at most about 10⁻⁹ M; at most about 10⁻¹⁰ M; at most about 10⁻¹¹ M; at most about 10⁻¹² M; and at most 10⁻¹³ M.

29. A binding protein conjugate comprising a binding protein according to any one of claim 1, 3, 6, 24, or 25, said binding protein conjugate further comprising an agent selected from the group consisting of; an immunoadhesion molecule, an imaging agent, a therapeutic agent, and a cytotoxic agent.

30. The binding protein conjugate according to claim 29, wherein said agent is an imaging agent selected from the group consisting of a radiolabel, an enzyme, a fluorescent label, a luminescent label, a bioluminescent label, a magnetic label, and biotin.

31. The binding protein conjugate according to claim 30, wherein said imaging agent is a radiolabel selected from the group consisting of: ³H, ¹⁴C, ³⁵S, ⁹⁰Y, ⁹⁹Tc, ¹¹¹In, ¹²⁵I, ¹³¹I, ¹⁷⁷Lu, ¹⁶⁶Ho, and ¹⁵³Sm.

32. The binding protein conjugate according to claim 30, wherein said agent is a therapeutic or cytotoxic agent selected from the group consisting of; an anti-metabolite, an alkylating agent, an antibiotic, a growth factor, a cytokine, an anti-angiogenic agent, an anti-mitotic agent, an anthracycline, toxin, and an apoptotic agent.

33. The binding protein according to claim 1, 3, 6, 24, or 25, wherein said binding protein is a crystallized binding protein.

34. The binding protein according to claim 33, wherein said crystal is a carrier-free pharmaceutical controlled release crystal.

35. The binding protein according to claim 33, wherein said binding protein has a greater half life in vivo than the soluble counterpart of said binding protein.

36. The binding protein according to claim 33, wherein said binding protein retains biological activity.

37. An isolated nucleic acid encoding a binding protein amino acid sequence according to any one of claim 1, 3, 6, 24, or 25.

38. A vector comprising an isolated nucleic acid according to claim 37.

39. The vector according to claim 38, wherein said vector is selected from the group consisting of pcDNA, pTT, pTT3, pEFBOS, pBV, pJV, pcDNA3.1 TOPO, pEF6 TOPO, and pBJ.

40. A host cell comprising a vector according to claim 38.

41. The host cell according to claim 40, wherein said host cell is a prokaryotic cell.

42. The host cell according to claim 41, wherein said host cell is E. Coli.

43. The host cell according to claim 40, wherein said host cell is a eukaryotic cell.

44. The host cell according to claim 43, wherein said eukaryotic cell is selected from the group consisting of protist cell, animal cell, plant cell and fungal cell.

45. The host cell according to claim 43, wherein said eukaryotic cell is an animal cell selected from the group consisting of; a mammalian cell, an avian cell, and an insect cell.

46. The host cell according to claim 45, wherein said host cell is a CHO cell.

47. The host cell according to claim 45, wherein said host cell is COS.

48. The host cell according to claim 43, wherein said host cell is a yeast cell.

49. The host cell according to claim 48, wherein said yeast cell is Saccharomyces cerevisiae.

50. The host cell according to claim 45, wherein said host cell is an insect Sf9 cell.

51. A method of producing a binding protein, comprising culturing a host cell described in any one of claims 40-50 in culture medium under conditions sufficient to produce the binding protein

52. The method according to claim 51, wherein 50%-75% of the binding protein produced is a dual specific tetravalent binding protein.

53. The method according to claim 51, wherein 75%-90% of the binding protein produced is a dual specific tetravalent binding protein.

54. The method according to claim 51, wherein 90%-95% of the binding protein produced is a dual specific tetravalent binding protein.

55. A protein produced according to the method of claim 51.

56. A pharmaceutical composition comprising the binding protein of any one of claims 1-36 and 55, and a pharmaceutically acceptable carrier.

57. The pharmaceutical composition of claim 56 further comprising at least one additional therapeutic agent.

58. The pharmaceutical composition of claim 57, wherein said additional therapeutic agent is selected from the group consisting of: Therapeutic agent, imaging agent, cytotoxic agent, angiogenesis inhibitors; kinase inhibitors; co-stimulation molecule blockers; adhesion molecule blockers; anti-cytokine antibody or functional fragment thereof; methotrexate; cyclosporin; rapamycin; FK506; detectable label or reporter; a TNF antagonist; an antirheumatic; a muscle relaxant, a narcotic, a non-steroid anti-inflammatory drug (NSAID), an analgesic, an anesthetic, a sedative, a local anesthetic, a neuromuscular blocker, an antimicrobial, an antipsoriatic, a corticosteriod, an anabolic steroid, an erythropoietin, an immunization, an immunoglobulin, an immunosuppressive, a growth hormone, a hormone replacement drug, a radiopharmaceutical, an antidepressant, an antipsychotic, a stimulant, an asthma medication, a beta agonist, an inhaled steroid, an epinephrine or analog, a cytokine, and a cytokine antagonist.

59. A method for treating a subject for a disease or a disorder by administering to the subject the binding protein of any one of claims 1-36 and 55 such that treatment is achieved.

60. The method of claim 59, wherein said disorder is selected from the group comprising rheumatoid arthritis, osteoarthritis, juvenile chronic arthritis, septic arthritis, Lyme arthritis, psoriatic arthritis, reactive arthritis, spondyloarthropathy, systemic lupus erythematosus, Crohn's disease, ulcerative colitis, inflammatory bowel disease, insulin dependent diabetes mellitus, thyroiditis, asthma, allergic diseases, psoriasis, dermatitis scleroderma, graft versus host disease, organ transplant rejection, acute or chronic immune disease associated with organ transplantation, sarcoidosis, atherosclerosis, disseminated intravascular coagulation, Kawasaki's disease, Grave's disease, nephrotic syndrome, chronic fatigue syndrome, Wegener's granulomatosis, Henoch-Schoenlein purpurea, microscopic vasculitis of the kidneys, chronic active hepatitis, uveitis, septic shock, toxic shock syndrome, sepsis syndrome, cachexia, infectious diseases, parasitic diseases, acquired immunodeficiency syndrome, acute transverse myelitis, Huntington's chorea, Parkinson's disease, Alzheimer's disease, stroke, primary biliary cirrhosis, hemolytic anemia, malignancies, heart failure, myocardial infarction, Addison's disease, sporadic, polyglandular deficiency type I and polyglandular deficiency type II, Schmidt's syndrome, adult (acute) respiratory distress syndrome, alopecia, alopecia greata, seronegative arthopathy, arthropathy, Reiter's disease, psoriatic arthropathy, ulcerative colitic arthropathy, enteropathic synovitis, chlamydia, yersinia and salmonella associated arthropathy, spondyloarthopathy, atheromatous disease/arteriosclerosis, atopic allergy, autoimmune bullous disease, pemphigus vulgaris, pemphigus foliaceus, pemphigoid, linear IgA disease, autoimmune haemolytic anaemia, Coombs positive haemolytic anaemia, acquired pernicious anaemia, juvenile pernicious anaemia, myalgic encephalitis/Royal Free Disease, chronic mucocutaneous candidiasis, giant cell arteritis, primary sclerosing hepatitis, cryptogenic autoimmune hepatitis, Acquired Immunodeficiency Disease Syndrome, Acquired Immunodeficiency Related Diseases, Hepatitis B, Hepatitis C, common varied immunodeficiency (common variable hypogammaglobulinaemia), dilated cardiomyopathy, female infertility, ovarian failure, premature ovarian failure, fibrotic lung disease, cryptogenic fibrosing alveolitis, post-inflammatory interstitial lung disease, interstitial pneumonitis, connective tissue disease associated interstitial lung disease, mixed connective tissue disease associated lung disease, systemic sclerosis associated interstitial lung disease, rheumatoid arthritis associated interstitial lung disease, systemic lupus erythematosus associated lung disease, dermatomyositis/polymyositis associated lung disease, Sjogren's disease associated lung disease, ankylosing spondylitis associated lung disease, vasculitic diffuse lung disease, haemosiderosis associated lung disease, drug-induced interstitial lung disease, fibrosis, radiation fibrosis, bronchiolitis obliterans, chronic eosinophilic pneumonia, lymphocytic infiltrative lung disease, postinfectious interstitial lung disease, gouty arthritis, autoimmune hepatitis, type-1 autoimmune hepatitis (classical autoimmune or lupoid hepatitis), type-2 autoimmune hepatitis (anti-LKM antibody hepatitis), autoimmune mediated hypoglycaemia, type B insulin resistance with acanthosis nigricans, hypoparathyroidism, acute immune disease associated with organ transplantation, chronic immune disease associated with organ transplantation, osteoarthrosis, primary sclerosing cholangitis, psoriasis type 1, psoriasis type 2, idiopathic leucopaenia, autoimmune neutropaenia, renal disease NOS, glomerulonephritides, microscopic vasulitis of the kidneys, lyme disease, discoid lupus erythematosus, male infertility idiopathic or NOS, sperm autoimmunity, multiple sclerosis (all subtypes), sympathetic ophthalmia, pulmonary hypertension secondary to connective tissue disease, Goodpasture's syndrome, pulmonary manifestation of polyarteritis nodosa, acute rheumatic fever, rheumatoid spondylitis, Still's disease, systemic sclerosis, Sjörgren's syndrome, Takayasu's disease/arteritis, autoimmune thrombocytopaenia, idiopathic thrombocytopaenia, autoimmune thyroid disease, hyperthyroidism, goitrous autoimmune hypothyroidism (Hashimoto's disease), atrophic autoimmune hypothyroidism, primary myxoedema, phacogenic uveitis, primary vasculitis, vitiligo acute liver disease, chronic liver diseases, alcoholic cirrhosis, alcohol-induced liver injury, choleosatatis, idiosyncratic liver disease, Drug-Induced hepatitis, Non-alcoholic Steatohepatitis, allergy and asthma, group B streptococci (GBS) infection, mental disorders (e.g., depression and schizophrenia), Th2 Type and Th1 Type mediated diseases, acute and chronic pain (different forms of pain), and cancers such as lung, breast, stomach, bladder, colon, pancreas, ovarian, prostate and rectal cancer and hematopoietic malignancies (leukemia and lymphoma) Abetalipoprotemia, Acrocyanosis, acute and chronic parasitic or infectious processes, acute leukemia, acute lymphoblastic leukemia (ALL), acute myeloid leukemia (AML), acute or chronic bacterial infection, acute pancreatitis, acute renal failure, adenocarcinomas, aerial ectopic beats, AIDS dementia complex, alcohol-induced hepatitis, allergic conjunctivitis, allergic contact dermatitis, allergic rhinitis, allograft rejection, alpha-1- antitrypsin deficiency, amyotrophic lateral sclerosis, anemia, angina pectoris, anterior horn cell degeneration, anti cd3 therapy, antiphospholipid syndrome, anti-receptor hypersensitivity reactions, aordic and peripheral aneuryisms, aortic dissection, arterial hypertension, arteriosclerosis, arteriovenous fistula, ataxia, atrial fibrillation (sustained or paroxysmal), atrial flutter, atrioventricular block, B cell lymphoma, bone graft rejection, bone marrow transplant (BMT) rejection, bundle branch block, Burkitt's lymphoma, Burns, cardiac arrhythmias, cardiac stun syndrome, cardiac tumors, cardiomyopathy, cardiopulmonary bypass inflammation response, cartilage transplant rejection, cerebellar cortical degenerations, cerebellar disorders, chaotic or multifocal atrial tachycardia, chemotherapy associated disorders, chromic myelocytic leukemia (CML), chronic alcoholism, chronic inflammatory pathologies, chronic lymphocytic leukemia (CLL), chronic obstructive pulmonary disease (COPD), chronic salicylate intoxication, colorectal carcinoma, congestive heart failure, conjunctivitis, contact dermatitis, cor pulmonale, coronary artery disease, Creutzfeldt-Jakob disease, culture negative sepsis, cystic fibrosis, cytokine therapy associated disorders, Dementia pugilistica, demyelinating diseases, dengue hemorrhagic fever, dermatitis, dermatologic conditions, diabetes, diabetes mellitus, diabetic ateriosclerotic disease, Diffuse Lewy body disease, dilated congestive cardiomyopathy, disorders of the basal ganglia, Down's Syndrome in middle age, drug- induced movement disorders induced by drugs which block CNS dopamine receptors, drug sensitivity, eczema, encephalomyelitis, endocarditis, endocrinopathy, epiglottitis, epstein-barr virus infection, erythromelalgia, extrapyramidal and cerebellar disorders, familial hematophagocytic lymphohistiocytosis, fetal thymus implant rejection, Friedreich's ataxia, functional peripheral arterial disorders, fungal sepsis, gas gangrene, gastric ulcer, glomerular nephritis, graft rejection of any organ or tissue, gram negative sepsis, gram positive sepsis, granulomas due to intracellular organisms, hairy cell leukemia, Hallervorden-Spatz disease, hashimoto's thyroiditis, hay fever, heart transplant rejection, hemachromatosis, hemodialysis, hemolytic uremic syndrome/thrombolytic thrombocytopenic purpura, hemorrhage, hepatitis (A), His bundle arrythmias, HIV infection/HIV neuropathy, Hodgkin's disease, hyperkinetic movement disorders, hypersensitity reactions, hypersensitivity pneumonitis, hypertension, hypokinetic movement disorders, hypothalamic-pituitary-adrenal axis evaluation, idiopathic Addison's disease, idiopathic pulmonary fibrosis, antibody mediated cytotoxicity, Asthenia, infantile spinal muscular atrophy, inflammation of the aorta, influenza a, ionizing radiation exposure, iridocyclitis/uveitis/optic neuritis, ischemia- reperfusion injury, ischemic stroke, juvenile rheumatoid arthritis, juvenile spinal muscular atrophy, Kaposi's sarcoma, kidney transplant rejection, legionella, leishmaniasis, leprosy, lesions of the corticospinal system, lipedema, liver transplant rejection, lymphederma, malaria, malignamt Lymphoma, malignant histiocytosis, malignant melanoma, meningitis, meningococcemia, metabolic/idiopathic, migraine headache, mitochondrial multi.system disorder, mixed connective tissue disease, monoclonal gammopathy, multiple myeloma, multiple systems degenerations (Mencel Dejerine- Thomas Shi-Drager and Machado-Joseph), myasthenia gravis, mycobacterium avium intracellulare, mycobacterium tuberculosis, myelodyplastic syndrome, myocardial infarction, myocardial ischemic disorders, nasopharyngeal carcinoma, neonatal chronic lung disease, nephritis, nephrosis, neurodegenerative diseases, neurogenic I muscular atrophies , neutropenic fever, non- hodgkins lymphoma, occlusion of the abdominal aorta and its branches, occulsive arterial disorders, okt3 therapy, orchitis/epidydimitis, orchitis/vasectomy reversal procedures, organomegaly, osteoporosis, pancreas transplant rejection, pancreatic carcinoma, paraneoplastic syndrome/hypercalcemia of malignancy, parathyroid transplant rejection, pelvic inflammatory disease, perennial rhinitis, pericardial disease, peripheral atherlosclerotic disease, peripheral vascular disorders, peritonitis, pernicious anemia, pneumocystis carinii pneumonia, pneumonia, POEMS syndrome (polyneuropathy, organomegaly, endocrinopathy, monoclonal gammopathy, and skin changes syndrome), post perfusion syndrome, post pump syndrome, post-MI cardiotomy syndrome, prlampsia, Progressive supranucleo Palsy, primary pulmonary hypertension, radiation therapy, Raynaud's phenomenon and disease, Raynoud's disease, Refsum's disease, regular narrow QRS tachycardia, renovascular hypertension, reperfusion injury, restrictive cardiomyopathy, sarcomas, scleroderma, senile chorea, Senile Dementia of Lewy body type, seronegative arthropathies, shock, sickle cell anemia, skin allograft rejection, skin changes syndrome, small bowel transplant rejection, solid tumors, specific arrythmias, spinal ataxia, spinocerebellar degenerations, streptococcal myositis, structural lesions of the cerebellum, Subacute sclerosing panencephalitis, Syncope, syphilis of the cardiovascular system, systemic anaphalaxis, systemic inflammatory response syndrome, systemic onset juvenile rheumatoid arthritis, T-cell or FAB ALL, Telangiectasia, thromboangitis obliterans, thrombocytopenia, toxicity, transplants, trauma/hemorrhage, type III hypersensitivity reactions, type IV hypersensitivity, unstable angina, uremia, urosepsis, urticaria, valvular heart diseases, varicose veins, vasculitis, venous diseases, venous thrombosis, ventricular fibrillation, viral and fungal infections, vital encephalitis/aseptic meningitis, vital-associated hemaphagocytic syndrome, Wernicke- Korsakoff syndrome, Wilson's disease, xenograft rejection of any organ or tissue, acute coronary syndromes, acute idiopathic polyneuritis, acute inflammatory demyelinating polyradiculoneuropathy, acute ischemia, adult Still's disease, alopecia greata, anaphylaxis, anti-phospholipid antibody syndrome, aplastic anemia, arteriosclerosis, atopic eczema, atopic dermatitis, autoimmune dermatitis, autoimmune disorder associated with streptococcus infection, autoimmune enteropathy, autoimmune hearing loss, autoimmune lymphoproliferative syndrome (ALPS), autoimmune myocarditis, autoimmune premature ovarian failure, blepharitis, bronchiectasis, bullous pemphigoid, cardiovascular disease, catastrophic antiphospholipid syndrome, celiac disease, cervical spondylosis, chronic ischemia, cicatricial pemphigoid, clinically isolated syndrome (cis) with risk for multiple sclerosis, conjunctivitis, childhood onset psychiatric disorder, chronic obstructive pulmonary disease (COPD), dacryocystitis, dermatomyositis, diabetic retinopathy, diabetes mellitus, disk herniation, disk prolaps, drug induced immune hemolytic anemia, endocarditis, endometriosis, endophthalmitis, episcleritis, erythema multiforme, erythema multiforme major, gestational pemphigoid, Guillain-Barré syndrome (GBS), hay fever, Hughes syndrome, idiopathic Parkinson's disease, idiopathic interstitial pneumonia, IgE-mediated allergy, immune hemolytic anemia, inclusion body myositis, infectious ocular inflammatory disease, inflammatory demyelinating disease, inflammatory heart disease, inflammatory kidney disease, IPF/UIP, iritis, keratitis, keratojuntivitis sicca, Kussmaul disease or Kussmaul-Meier disease, Landry's paralysis, Langerhan's cell histiocytosis, livedo reticularis, macular degeneration, microscopic polyangiitis, morbus bechterev, motor neuron disorders, mucous membrane pemphigoid, multiple organ failure, myasthenia gravis, myelodysplastic syndrome, myocarditis, nerve root disorders, neuropathy, non-A non-B hepatitis, optic neuritis, osteolysis, ovarian cancer, pauciarticular JRA, peripheral artery occlusive disease (PAOD), peripheral vascular disease (PVD), peripheral artery, disease (PAD), phlebitis, polyarteritis nodosa (or periarteritis nodosa), polychondritis, polymyalgia rheumatica, poliosis, polyarticular JRA, polyendocrine deficiency syndrome, polymyositis, polymyalgia rheumatica (PMR), post-pump syndrome, primary Parkinsonism, prostate and rectal cancer and hematopoietic malignancies (leukemia and lymphoma), prostatitis, pure red cell aplasia, primary adrenal insufficiency, recurrent neuromyelitis optica, restenosis, rheumatic heart disease, sapho (synovitis, acne, pustulosis, hyperostosis, and osteitis), scleroderma, secondary amyloidosis, shock lung, scleritis, sciatica, secondary adrenal insufficiency, silicone associated connective tissue disease, sneddon-wilkinson dermatosis, spondilitis ankylosans, Stevens-Johnson syndrome (SJS), systemic inflammatory response syndrome, temporal arteritis, toxoplasmic retinitis, toxic epidermal necrolysis, transverse myelitis, TRAPS (tumor necrosis factor receptor, type 1 allergic reaction, type II diabetes, urticaria, usual interstitial pneumonia (UIP), vasculitis, vernal conjunctivitis, viral retinitis, Vogt-Koyanagi-Harada syndrome (VKH syndrome), wet macular degeneration, wound healing, yersinia and salmonella associated arthropathy.

61. The method according to claim 60, wherein said administering to the subject is by at least one mode selected from parenteral, subcutaneous, intramuscular, intravenous, intrarticular, intrabronchial, intraabdominal, intracapsular, intracartilaginous, intracavitary, intracelial, intracerebellar, intracerebroventricular, intracolic, intracervical, intragastric, intrahepatic, intramyocardial, intraosteal, intrapelvic, intrapericardiac, intraperitoneal, intrapleural, intraprostatic, intrapulmonary, intrarectal, intrarenal, intraretinal, intraspinal, intrasynovial, intrathoracic, intrauterine, intravesical, bolus, vaginal, rectal, buccal, sublingual, intranasal, and transdermal.

62. A method for generating a Dual Variable Domain Immunoglobulin capable of binding two antigens comprising the steps of
a) obtaining a first parent antibody or antigen binding portion thereof, capable of binding a first antigen;
b) obtaining a second parent antibody or antigen binding portion thereof, capable of binding a second antigen;
c) constructing first and third polypeptide chains comprising VD1-(X1)n-VD2-C-(X2)n, wherein
VD1 is a first heavy chain variable domain obtained from said first parent antibody or antigen binding portion thereof;
VD2 is a second heavy chain variable domain obtained from said second parent antibody or antigen binding portion thereof;
C is a heavy chain constant domain;
X1 is a linker with the proviso that it is not CH1;
X2 is an Fc region;
(X1)n is (X1)0 or (X1)1; and
(X2)n is (X2)0 or (X2)1; and
d) constructing second and fourth polypeptide chains comprising VD1-(X1)n-VD2-C-(X2)n, wherein
VD1 is a first light chain variable domain obtained from said first parent antibody or antigen binding portion thereof;
VD2 is a second light chain variable domain obtained from said second parent antibody or antigen binding thereof;
C is a light chain constant domain;
X1 is a linker with the proviso that it is not CH1;
X2 does not comprise an Fc region;
(X1)n is (X1)0 or (X1)1; and
(X2)n is (X2)0 or (X2)1; and
e) expressing said first, second, third and fourth polypeptide chains;
such that a Dual Variable Domain Immunoglobulin capable of binding said first and said second antigen is generated, wherein the binding protein is capable of binding a pair of antigens selected from the group consisting of CD-20 and CD-19; CD-20 and CD-80; CD-20 and CD-22; CD-20 and CD-40; CD-3 and HER-2; CD-3 and CD-19; EGFR and HER-2; EGFR and CD-3; EGFR and IGF1,2; EGFR and IGF1R; EGFR and RON; EGFR and HGF; EGFR and c-MET; HER-2 and IGF1,2; HER-2 and IGF1R; RON and HGF; VEGF and EGFR; VEGF and HER-2; VEGF and CD-20; VEGF and IGF1,2; VEGF and DLL4; VEGF and HGF; VEGF and RON; VEGF and NRP1; CD-20 and CD3; DLL-4 and PLGF; VEGF and PLGF; ErbB3 and EGFR; ErbB3 and HGF; HER-2 and ErbB3; c-Met and ErB3; PLGF and HER-2; and HER-2 and HER-2.

63. The method of claim 62, wherein the VD1 and VD2 heavy chain variable domains comprise an amino acid sequence selected from the group consisting of SEQ ID NOs: 28, 30, 32, 34, 36, 38, 40, 42, 44, 46, 48, 50, 52, 54, 56, 58, 60, 62, 64, 66, 68, 70, 72, 74, 76, 78, 80, 82, 84, 86, 88, 90, 92, 94, 96, 98, 100, 102, 104, and 106 and wherein the VD1 and VD2 light chain variable domains comprise an amino acid sequence selected from the group consisting of SEQ ID NOs: 29, 31, 33, 35, 37, 39, 41, 43, 45, 47, 49, 51, 53, 55, 57, 59, 61, 63, 65, 67, 69, 71, 73, 75, 77, 79, 81, 83, 85, 87, 89, 91, 93, 95, 97, 99, 101, 103, 105 and 107.

64. The method of claim 62, wherein said first parent antibody or antigen binding portion thereof, and said second parent antibody or antigen binding portion thereof, are selected from the group consisting of a human antibody, a CDR grafted antibody, and a humanized antibody.

65. The method of claim 62, wherein said first parent antibody or antigen binding portion thereof, and said second parent antibody or antigen binding portion thereof, are selected from the group consisting of a Fab fragment, a F(ab′)₂ fragment, a bivalent fragment comprising two Fab fragments linked by a disulfide bridge at the hinge region; a Fd fragment consisting of the VH and CH1 domains; a Fv fragment consisting of the VL and VH domains of a single arm of an antibody, a dAb fragment, an isolated complementarity determining region (CDR), a single chain antibody, and diabodies.

66. The method of claim 62, wherein said first parent antibody or antigen binding portion thereof possesses at least one desired property exhibited by the Dual Variable Domain Immunoglobulin.

67. The method of claim 62, wherein said second parent antibody or antigen binding portion thereof possesses at least one desired property exhibited by the Dual Variable Domain Immunoglobulin.

68. The method of claim 62, wherein the Fc region is selected from the group consisting of a native sequence Fc region and a variant sequence Fc region.

69. The method of claim 62, wherein the Fc region is selected from the group consisting of an Fc region from an IgG1, IgG2, IgG3, IgG4, IgA, IgM, IgE, and IgD.

70. The method of claim 66, wherein said desired property is selected from one or more antibody parameters.

71. The method of claim 67, wherein said desired property is selected from one or more antibody parameters.

72. The method of claim 70, wherein said antibody parameters are selected from the group consisting of antigen specificity, affinity to antigen, potency, biological function, epitope recognition, stability, solubility, production efficiency, immunogenicity, pharmacokinetics, bioavailability, tissue cross reactivity, and orthologous antigen binding.

73. The method of claim 71, wherein said antibody parameters are selected from the group consisting of antigen specificity, affinity to antigen, potency, biological function, epitope recognition, stability, solubility, production efficiency, immunogenicity, pharmacokinetics, bioavailability, tissue cross reactivity, and orthologous antigen binding.

74. The method of claim 62, wherein said first parent antibody or antigen binding portion thereof, binds said first antigen with a different affinity than the affinity with which said second parent antibody or antigen binding portion thereof, binds said second antigen.

75. The method of claim 62, wherein said first parent antibody or antigen binding portion thereof, binds said first antigen with a different potency than the potency with which said second parent antibody or antigen binding portion thereof, binds said second antigen.

76. A method for generating a Dual Variable Domain Immunoglobulin capable of binding two antigens with desired properties comprising the steps of
a) obtaining a first parent antibody or antigen binding portion thereof, capable of binding a first antigen and possessing at least one desired property exhibited by the Dual Variable Domain Immunoglobulin;
b) obtaining a second parent antibody or antigen binding portion thereof, capable of binding a second antigen and possessing at least one desired property exhibited by the Dual Variable Domain Immunoglobulin;
c) constructing first and third polypeptide chains comprising VD1-(X1)n-VD2-C-(X2)n, wherein;
VD1 is a first heavy chain variable domain obtained from said first parent antibody or antigen binding portion thereof;
VD2 is a second heavy chain variable domain obtained from said second parent antibody or antigen binding portion thereof;
C is a heavy chain constant domain;
X1 is a linker with the proviso that it is not CH1;
X2 is an Fc region;
(X1)n is (X1)0 or (X1)1; and
(X2)n is (X2)0 or (X2)1;
d) constructing second and fourth polypeptide chains comprising VD1-(X1)n-VD2-C-(X2)n, wherein;
VD1 is a first light chain variable domain obtained from said first parent antibody or antigen binding portion thereof;
VD2 is a second light chain variable domain obtained from said second parent antibody or antigen binding portion thereof;
C is a light chain constant domain;
X1 is a linker with the proviso that it is not CH1;
X2 does not comprise an Fc region;
(X1)n is (X1)0 or (X1)1; and
(X2)n is (X2)0 or (X2)1;
e) expressing said first, second, third and fourth polypeptide chains;
such that a Dual Variable Domain Immunoglobulin capable of binding said first and said second antigen with desired properties is generated, wherein the binding protein is capable of binding a pair of antigens selected from the group consisting of CD-20 and CD-19; CD-20 and CD-80; CD-20 and CD-22; CD-20 and CD-40; CD-3 and HER-2; CD-3 and CD-19; EGFR and HER-2; EGFR and CD-3; EGFR and IGF1,2; EGFR and IGF1R; EGFR and RON; EGFR and HGF; EGFR and c-MET; HER-2 and IGF1,2; HER-2 and IGF1R; RON and HGF; VEGF and EGFR; VEGF and HER-2; VEGF and CD-20; VEGF and IGF1,2; VEGF and DLL4; VEGF and HGF; VEGF and RON; VEGF and NRP1; CD-20 and CD3; DLL-4 and PLGF; VEGF and PLGF; ErbB3 and EGFR; ErbB3 and HGF; HER-2 and ErbB3; c-Met and ErB3; PLGF and HER-2; and HER-2 and HER-2.

77. A method for improving a characteristic of the binding protein of claim 6, the method comprising the steps of:
(a) determining the characteristic of the binding protein prior to alteration;
(a) altering the length and/or sequence of (X1)₁ of the heavy and/or light chain thereby providing an altered heavy and/or light chain;
(b) determining the improved characteristic of the altered binding protein comprising the altered heavy and light chains.

78. A method for improving a characteristic of the binding protein of claim 6, the method comprising the steps of:
(a) determining the characteristic of the binding protein prior to alteration;
(b) altering the first and second polypeptide chains such that VD1-(X1)n-VD2-C-(X2)n is changed to VD2-(X1)n-VD1-C-(X2)n, thereby providing altered heavy and light chains;
(c) determining the improved characteristic of the altered binding protein comprising the altered heavy and light chains.

79. A method for improving a characteristic of the binding protein of claim 6, the method comprising the steps of:
(a) determining the characteristic of the binding protein prior to alteration;
(b) altering the first and/or second polypeptide chains such that the sequence of only one of the VD1 or VD2 of the heavy and/or light chain is changed; and
(c) determining the characteristic of the altered binding protein comprising the altered heavy and light chains.

80. The method of any one of claims 77-78, wherein the characteristic is selected from the group consisting of binding to target antigen, expression yield from host cell, in vitro halflife, in vivo halflife, stability, solubility, and improved effector function.

81. The method of claim 77, wherein the length of the (X1)₁ of the altered heavy chain is increased.

82. The method of claim 77 or 80, wherein the length of the (X1)₁ of the altered heavy chain is decreased.

83. The method of claim 77 or 80, wherein the length of the (X1)₁ of the altered light chain is increased.

84. The method of claim 77 or 80, wherein the length of the (X1)₁ of the altered light chain is decreased.

85. The method of claim 77 or 80, wherein the (X1)₁ of the altered heavy chain comprises an amino acid selected from the group consisting of SEQ ID NO:21 or 22.

86. The method of claim 77 or 80, wherein the (X1)₁ of the altered light chain comprises an amino acid selected from the group consisting of SEQ ID NO:13 or 14.

87. The method of claim 77 or 80, wherein the (X1)₁ of the altered heavy chain is SEQ ID NO:22 and the (X1)1 of the altered light chain is SEQ ID NO:14.

88. The method of claim 77 or 80, wherein the (X1)₁ of the altered heavy chain is SEQ ID NO:21 and the (X1)1 of the altered light chain is SEQ ID NO:14.

89. The method of claim 77 or 80, wherein the (X1)₁ of the altered heavy chain is SEQ ID NO:22 and the (X1)1 of the altered light chain is SEQ ID NO:13.

90. The method of claim 77 or 80, wherein the (X1)₁ of the altered heavy chain is SEQ ID NO:21 and the (X1)1 of the altered light chain is SEQ ID NO:13.

The application's sequence listing, which the Patent Office published only in electronic form, follows.

SEQUENCE LISTING (935 sequences)

SEQ ID NO: 1 - protein, 16 aa, Artificial Sequence
  Description of Artificial Sequence: Synthetic peptide
AKTTPKLEEGEFSEAR

SEQ ID NO: 2 - protein, 17 aa, Artificial Sequence
  Description of Artificial Sequence: Synthetic peptide
AKTTPKLEEGEFSEARV

SEQ ID NO: 3 - protein, 9 aa, Artificial Sequence
  Description of Artificial Sequence: Synthetic peptide
AKTTPKLGG

SEQ ID NO: 4 - protein, 10 aa, Artificial Sequence
  Description of Artificial Sequence: Synthetic peptide
SAKTTPKLGG

SEQ ID NO: 5 - protein, 6 aa, Artificial Sequence
  Description of Artificial Sequence: Synthetic peptide
SAKTTP

SEQ ID NO: 6 - protein, 6 aa, Artificial Sequence
  Description of Artificial Sequence: Synthetic peptide
RADAAP

SEQ ID NO: 7 - protein, 9 aa, Artificial Sequence
  Description of Artificial Sequence: Synthetic peptide
RADAAPTVS

SEQ ID NO: 8 - protein, 12 aa, Artificial Sequence
  Description of Artificial Sequence: Synthetic peptide
RADAAAAGGPGS

SEQ ID NO: 9 - protein, 27 aa, Artificial Sequence
  Description of Artificial Sequence: Synthetic peptide
RADAAAAGGGGSGGGGSGGGGSGGGGS

SEQ ID NO: 10 - protein, 18 aa, Artificial Sequence
  Description of Artificial Sequence: Synthetic peptide
SAKTTPKLEEGEFSEARV

SEQ ID NO: 11 - protein, 5 aa, Artificial Sequence
  Description of Artificial Sequence: Synthetic peptide
ADAAP

SEQ ID NO: 12 - protein, 12 aa, Artificial Sequence
  Description of Artificial Sequence: Synthetic peptide
ADAAPTVSIFPP

SEQ ID NO: 13 - protein, 5 aa, Artificial Sequence
  Description of Artificial Sequence: Synthetic peptide
TVAAP

SEQ ID NO: 14 - protein, 12 aa, Artificial Sequence
  Description of Artificial Sequence: Synthetic peptide
TVAAPSVFIFPP

SEQ ID NO: 15 - protein, 6 aa, Artificial Sequence
  Description of Artificial Sequence: Synthetic peptide
QPKAAP

SEQ ID NO: 16 - protein, 13 aa, Artificial Sequence
  Description of Artificial Sequence: Synthetic peptide
QPKAAPSVTLFPP

SEQ ID NO: 17 - protein, 6 aa, Artificial Sequence
  Description of Artificial Sequence: Synthetic peptide
AKTTPP

SEQ ID NO: 18 - protein, 13 aa, Artificial Sequence
  Description of Artificial Sequence: Synthetic peptide
AKTTPPSVTPLAP

SEQ ID NO: 19 - protein, 6 aa, Artificial Sequence
  Description of Artificial Sequence: Synthetic peptide
AKTTAP

SEQ ID NO: 20 - protein, 13 aa, Artificial Sequence
  Description of Artificial Sequence: Synthetic peptide
AKTTAPSVYPLAP

SEQ ID NO: 21 - protein, 6 aa, Artificial Sequence
  Description of Artificial Sequence: Synthetic peptide
ASTKGP

SEQ ID NO: 22 - protein, 13 aa, Artificial Sequence
  Description of Artificial Sequence: Synthetic peptide
ASTKGPSVFPLAP

SEQ ID NO: 23 - protein, 15 aa, Artificial Sequence
  Description of Artificial Sequence: Synthetic peptide
GGGGSGGGGSGGGGS

SEQ ID NO: 24 - protein, 15 aa, Artificial Sequence
  Description of Artificial Sequence: Synthetic peptide
GENKVEYAPALMALS

SEQ ID NO: 25 - protein, 15 aa, Artificial Sequence
  Description of Artificial Sequence: Synthetic peptide
GPAKELTPLKEAKVS

SEQ ID NO: 26 - protein, 15 aa, Artificial Sequence
  Description of Artificial Sequence: Synthetic peptide
GHEAAAVMQVQYPAS

SEQ ID NO: 27 - protein, 5 aa, Artificial Sequence
  Description of Artificial Sequence: Synthetic peptide
GGGGS

SEQ ID NO: 28 - protein, 121 aa, Artificial Sequence [sequence omitted]

SEQ ID NO: 29 - protein, 107 aa, Artificial Sequence
  Description of Artificial Sequence: Synthetic polypeptide
QIVLSQSPAILSPSPGEKVTMTCRASSSVSYIHWFQQKPGSSPKPWIYATSNLASGVPVRFSGSGSGTSYSLTISRVEAEDAATYYCQQWTSNPPTFGGGTKLEIKR

SEQ ID NO: 30 - protein, 119 aa, Artificial Sequence [sequence omitted]

SEQ ID NO: 31 - protein, 107 aa, Artificial Sequence
  Description of Artificial Sequence: Synthetic polypeptide
QIVLTQSPAIMSASPGEKVTMTCRASSSVSYMNWYQQKSGTSPKRWIYDTSKVASGVPYRFSGSGSGTSYSLTISSMEAEDAATYYCQQWSSNPLTFGSGTKLEINR

SEQ ID NO: 32 - protein, 119 aa, Artificial Sequence [sequence omitted]

SEQ ID NO: 33 - protein, 108 aa, Artificial Sequence
  Description of Artificial Sequence: Synthetic polypeptide
DIQMTQSPSSLSASVGDRVTITCQASQDISNYLNWYQQKPGKAPKLLIYDASNLETGVPSRFSGSGSGTDFTFTISSLQPEDIATYFCQHFDHLPLAFGGGTKVEIKR

SEQ ID NO: 34 - protein, 120 aa, Artificial Sequence [sequence omitted]

SEQ ID NO: 35 - protein, 108 aa, Artificial Sequence
  Description of Artificial Sequence: Synthetic polypeptide
DIQMTQSPSSLSASVGDRVTITCRASQDVNTAVAWYQQKPGKAPKLLIYSASFLYSGVPSRFSGSRSGTDFTLTISSLQPEDFATYYCQQHYTTPPTFGQGTKVEIKR

SEQ ID NO: 36 - protein, 124 aa, Artificial Sequence
  Description of Artificial Sequence: Synthetic polypeptide
EVQLVQSGGGLVKPGGSLRLSCAASGFTFSSYAMHWVRQAPGKGLEWVAVISYDGSNKYYADSVKGRFTISRDNSKNTLYLQMNSLRAEDTAVYYCARFSGWPNNYYYYGMDVWGQGTTVTVSS

SEQ ID NO: 37 - protein, 114 aa, Artificial Sequence
  Description of Artificial Sequence: Synthetic polypeptide
DVVMTQSPLSLPVTPGEPASISCRSSQSLLHSNGFNYVDWYLQKPGQSPHLLIYFGSYRASGVPDRFSGSGSGTDFTLKISRVEAEDVGVYYCMQALQTPPWTFGQGTKVEIRR

SEQ ID NO: 38 - protein, 124 aa, Artificial Sequence
  Description of Artificial Sequence: Synthetic polypeptide
QVQLQQSGAELVRPGSSVKISCKASGYAFSSYWMNWVKQRPGQGLEWIGQIWPGDGDTNYNGKFKGKATLTADESSSTAYMQLSSLASEDSAVYFCARRETTTVGRYYYAMDYWGQGTSVTVSS

SEQ ID NO: 39 - protein, 112 aa, Artificial Sequence
  Description of Artificial Sequence: Synthetic polypeptide
DILLTQTPASLAVSLGQRATISCKASQSVDYDGDSYLNWYQQIPGQPPKLLIYDASNLVSGIPPRFSGSGSGTDFTLNIHPVEKVDAATYHCQQSTEDPWTFGGGTKLEIKR

SEQ ID NO: 40 - protein, 127 aa, Artificial Sequence [sequence omitted]

SEQ ID NO: 41 - protein, 111 aa, Artificial Sequence
  Description of Artificial Sequence: Synthetic polypeptide
ESALTQPPSVSGAPGQKVTISCTGSTSNIGGYDLHWYQQLPGTAPKLLIYDINKRPSGISDRFSGSKSGTAASLAITGLQTEDEADYYCQSYDSSLNAQVFGGGTRLTVLG

SEQ ID NO: 42 - protein, 116 aa, Artificial Sequence [sequence omitted]

SEQ ID NO: 43 - protein, 113 aa, Artificial Sequence
  Description of Artificial Sequence: Synthetic polypeptide
DIQLTQSPSSLSASVGDRVTMSCKSSQSVLYSANHKNYLAWYQQKPGKAPKLLIYWASTRESGVPSRFSGSGSGTDFTFTISSLQPEDIATYYCHQYLSSWTFGGGTKLEIKR

SEQ ID NO: 44 - protein, 120 aa, Artificial Sequence
  Description of Artificial Sequence: Synthetic polypeptide
QVQLVESGGGVVQPGRSLRLSCAASGFTFSSYGMHWVRQAPGKGLEWVAVISYEESNRYHADSVKGRFTISRDNSKITLYLQMNSLRTEDTAVYYCARDGGIAAPGPDYWGQGTLVTVSS

SEQ ID NO: 45 - protein, 113 aa, Artificial Sequence
  Description of Artificial Sequence: Synthetic polypeptide
DIVMTQSPLSLTVTPGEPASISCRSSQSLLYSNGYNYLDWYLQKPGQSPQVLISLGSNRASGVPDRFSGSGSGTDFTLKISRVEAEDVGVYYCMQARQTPFTFGPGTKVDIRR

SEQ ID NO: 46 - protein, 120 aa, Artificial Sequence
  Description of Artificial Sequence: Synthetic polypeptide
QVQLVQSGAEVKKPGASVKVSCKASGYTFTSYDINWVRQATGQGLEWMGWMNPNSGNTGYAQKFQGRVTMTRNTSISTAYMELSSLRSEDTAVYYCARDPYYYYYGMDVWGQGTTVTVSS

SEQ ID NO: 47 - protein, 112 aa, Artificial Sequence
  Description of Artificial Sequence: Synthetic polypeptide
QSVLTQPPSVSAAPGQKVTISCSGSSSNIENNHVSWYQQLPGTAPKLLIYDNNKRPSGIPDRFSGSKSGTSATLGITGLQTGDEADYYCETWDTSLSAGRVFGGGTKLTVLG

SEQ ID NO: 48 - protein, 125 aa, Artificial Sequence [sequence omitted]

SEQ ID NO: 49 - protein, 108 aa, Artificial Sequence
  Description of Artificial Sequence: Synthetic polypeptide
DIQMTQFPSSLSASVGDRVTITCRASQGIRNDLGWYQQKPGKAPKRLIYAASRLHRGVPSRFSGSGSGTEFTLTISSLQPEDFATYYCLQHNSYPCSFGQGTKLEIKR

SEQ ID NO: 50 - protein, 122 aa, Artificial Sequence
  Description of Artificial Sequence: Synthetic polypeptide
QVQLVESGGGLVKPGGSLRLSCAASGFTFSDYYMSWIRQAPGKGLEWVSYISSSGSTIYYADSVKGRFTISRDNAKNSLYLQMNSLRAEDTAVYYCARDEYNSGWYVLFDYWGQGTLVTVSS

SEQ ID NO: 51 - protein, 108 aa, Artificial Sequence
  Description of Artificial Sequence: Synthetic polypeptide
DIQMTQSPSSVSASVGDRVTITCRASQGISSWLAWYQQKPGKAPNLLIYEASSLQSGVPSRFGGSGSGTDFTLTISSLQPEDFATYYCQQANGFPWTFGQGTKVEIKR

SEQ ID NO: 52 - protein, 121 aa, Artificial Sequence
  Description of Artificial Sequence: Synthetic polypeptide
QVQLQQSGPELVRPGASVKWSCPASGYTFTSYWLHWVKKQRPGQGLEWIGMIDPSNSDTRFNPPNFKDKATLNVDRSSNTAYNLLSSLTSADSAVYYCATYGSYVSPLDYWGQGTSVYVSS

SEQ ID NO: 53 - protein, 114 aa, Artificial Sequence
  Description of Artificial Sequence: Synthetic polypeptide
DIMMSQSPSSLTVSVGEKVTVSCKSSQSLLVTSSQKNYLAWYQQKPQQSPKLLIYWASTRESGVPDRFTGSGSGTDFTLTITSVKADDLAVYYCQQYYAYPWTFGDGTKLEIKR

SEQ ID NO: 54 - protein, 123 aa, Artificial Sequence [sequence omitted]

SEQ ID NO: 55 - protein, 108 aa, Artificial Sequence
  Description of Artificial Sequence: Synthetic polypeptide
DIQMTQSPSSLSASVGDRVTITCSASQDISNYLNWYQQKPGKAPKVLIYFTSSLHSGVPSRFSGSGSGTDFTLTISSLQPEDFATYYCQQYSTVPWTFGQGTKVEIKR

SEQ ID NO: 56 - protein, 118 aa, Artificial Sequence
  Description of Artificial Sequence: Synthetic polypeptide
EVQLVESGGGLVQPGGSLRLSCAASGFTFTDNWISWVRQAPGKGLEWVGYISPNSGFTYYADSVKGRFTISADTSKNTAYLQMNSLRAEDTAVYYCARDNFGGYFDYWGQGTLVTVSS

SEQ ID NO: 57 - protein, 109 aa, Artificial Sequence
  Description of Artificial Sequence: Synthetic polypeptide
DIQMTQSPSSLSASVGDRVTITCRASQDVSTAVAWYQQKPGKAPKLLIYSASFLYSGVPSRFSGSGSGTDFTLTISSLQPEDFATTYYCQQSYTGTVTFGQGTKVEIKR

SEQ ID NO: 58 - protein, 119 aa, Artificial Sequence
  Description of Artificial Sequence: Synthetic polypeptide
EVQLVESGGGLVQPGGSLRLSCAASGFSFSSEPISWVRQAPGKGLEWVSSITGKNGYTYYADSVKGRFTISADTSKNTAYLQMNSLRAEDTAVYYCARWGKKVYGMDVWGQGTLVTVSS

SEQ ID NO: 59 - protein, 108 aa, Artificial Sequence
  Description of Artificial Sequence: Synthetic polypeptide
DIQMTQSPSSLSASVGDRVTITCRASQSISSYLAWYQQKPGKAPKLLIYGASSRASGVPSRFSGSGSGTDFTLTISSLQPEDFATYYCQQYMSVPITFGQGTKVEIKR

SEQ ID NO: 60 - protein, 119 aa, Artificial Sequence
  Description of Artificial Sequence: Synthetic polypeptide
QVQLKQSGPGLVQPSQSLSITCTVSGFSLTNYGVHWVRQSPGKGLEWLGVIWSGGNTDYNTPFTSRLSINKDNSKSQVFFKMNSLQSNDTAIYYCARALTYYDYEFAYWGQGTLVTVSA

SEQ ID NO: 61 - protein, 108 aa, Artificial Sequence
  Description of Artificial Sequence: Synthetic polypeptide
DILLTQSPVILSVSPGERVSFSCRASQSIGTNIHWYQQRTNGSPRLLIKYASESISGIPSRFSGSGSGTDFTLSINSVESEDIADYYCQQNNNWPTTFGAGTKLELKR

SEQ ID NO: 62 - protein, 127 aa, Artificial Sequence
  Description of Artificial Sequence: Synthetic polypeptide
QVQLQESGPGLVKPSEILSLTCTVSGGSISSHYWSWVRQPPGKGLEWIGYIYYSGSTNYNPSLKSRVTISVDTSKNQFSLNLSSVTAADTAVYYCARIPNYYDRSGYYPGYWYFDLWGRGTLVTVSS

SEQ ID NO: 63 - protein, 116 aa, Artificial Sequence
  Description of Artificial Sequence: Synthetic polypeptide
QAVLTQPSSLSAPPGASASLTCTLRSGFNVDSYRISWYQQKPGSPPQYLLRYKSDSDKQQGSGVPSRFSGSKDASANAGILLISGLQSEDEADYYCMIWHSSAWVFGGGTKLTVLR

SEQ ID NO: 64 - protein, 122 aa, Artificial Sequence
  Description of Artificial Sequence: Synthetic polypeptide
EVQLVESGGGLVQPGGSLRLSCAASGFTFSSYAMSWVRQAPGKGLEWVSQISPAGGYTNYADSVKGRFTISADTSKNTAYLQMNSLRAEDTAVYYCARELPYYRMSKVMDVQGQGTLVTVSS

SEQ ID NO: 65 - protein, 108 aa, Artificial Sequence [sequence omitted]

SEQ ID NO: 66 - protein, 119 aa, Artificial Sequence [sequence omitted]

SEQ ID NO: 67 - protein, 107 aa, Artificial Sequence
  Description of Artificial Sequence: Synthetic polypeptide
QIVLTQSPAIMSASPGEKVTMTCSASSSVSYMNWYQQKSGTSPKRWIYDTSKLASGVPAHFRGSGSGTSYSLTISGMEAEDAATYYCQQWSSNPFTFGSGTKLEINR

SEQ ID NO: 68 - protein, 116 aa, Artificial Sequence
  Description of Artificial Sequence: Synthetic polypeptide
QVQLQQSGAELVKPGASVKISCKASGYTFTDYYINWVKLAPGQGLEWIGWIYPGSGNTKYNEKFKGKATLTIDTSSSTAYMQLSSLTSEDTAVYFCVRDSPFFDYWGQGTLLTVSS

SEQ ID NO: 69 - protein, 113 aa, Artificial Sequence
  Description of Artificial Sequence: Synthetic polypeptide
DIVLTQSPDSLAVSLGERVTMNCKSSQSLLNSGMRKSFLAWYQQKPGQSPKLLIYWASTRESGVPDRFTGSGSGTDFTLTISSVQAEDVAVYYCKQSYHLFTFGSGTKLEIKR

SEQ ID NO: 70 - protein, 117 aa, Artificial Sequence [sequence omitted]

SEQ ID NO: 71 - protein, 114 aa, Artificial Sequence
  Description of Artificial Sequence: Synthetic polypeptide
DIEMTQSPDSLAVSLGERATINCRSSQSVLYSSSNRNYLAWYQQNPGQPPKLLIYWASTRESGVPDRFSGSGSGTDFTLTISSLQAEDVAVYYCQQYYSTPRTFGQGTKVEIKR

SEQ ID NO: 72 - protein, 119 aa, Artificial Sequence
  Description of Artificial Sequence: Synthetic polypeptide
EVQLVESGGGLVQPGGSLRLSCAASGFTFSIYSMNWVRQAPGKGLEWVSYISSSSSTIYYADSVKGRFTISRDNAKNSLYLQMNSLRDEDTAVYYCARDRGDFDAFDIWGQGTMVTVSS

SEQ ID NO: 73 - protein, 108 aa, Artificial Sequence
  Description of Artificial Sequence: Synthetic polypeptide
DIQMTQSPSSLSASVGDRVTITCQASQDITNYLNWYQQKPGKAPKLLIYDASNLETGVPSRFSGSGSGTDFTFTISSLQPEDIATYNCQQCENFPITFGQGTRLEIKR

SEQ ID NO: 74 - protein, 119 aa, Artificial Sequence [sequence omitted]

SEQ ID NO: 75 - protein, 112 aa, Artificial Sequence
  Description of Artificial Sequence: Synthetic polypeptide
QSALTQPASVSGSPGQSITISCTGTSSDVGSYNVVSWYQQHPGKAPKLIIYEVSQRPSGVSNRFSGSKSGNTASLTISGLQTEDEADYYCCSYAGSSIFVIFGGGTKVTVLG

SEQ ID NO: 76 - protein, 119 aa, Artificial Sequence
  Description of Artificial Sequence: Synthetic polypeptide
QVQLVQSGAEVKKPGASVKISCKASGYSFTAYYIHWVKQAPGQGLEWIGYISSYNGATNYNQKFKGRVTFTTDTSTSTAYMELRSLRSDDTAVYYCARDYDYDVGMDYWGQGTLVTVSS

SEQ ID NO: 77 - protein, 112 aa, Artificial Sequence
  Description of Artificial Sequence: Synthetic polypeptide
DIVMTQSPDSLAVSLGERATISCRASESVDNYGISFMKWFQQKPGQPPKLLIYAASNQGSGVPDRFSGSGSGTDFTLTISSLQAEDVAVYYCQQSKEVPWTFGGGTKVEIKR

SEQ ID NO: 78 - protein, 120 aa, Artificial Sequence
  Description of Artificial Sequence: Synthetic polypeptide
EVQLVESGGGLVQPGGSLRLSCAASGFTISDYWIHWVRQAPGKGLEWVAGITPAGGYTYYADSVKGRFTISADTSKNTAYLQMNSLRAEDTAVYYCARFVFFLPYAMDYWGQGTLVTVSS

SEQ ID NO: 79 - protein, 108 aa, Artificial Sequence
  Description of Artificial Sequence: Synthetic polypeptide
DIQMTQSPSSLSASVGDRVTITCRASQDVSTAVAWYQQKPGKAPKLLIYSASFLYSGVPSRFSGSGSGTDFTLTISSLQPEDFATYYCQQSYTTPPTFGQGTKVEIKR

SEQ ID NO: 80 - protein, 121 aa, Artificial Sequence
  Description of Artificial Sequence: Synthetic polypeptide
EVQLVESGGGLVQPGGSLRLSCAASGFTINASWIHWVRQAPGKGLEWVGAIYPYSGYTNYADSVKGRFTISADTSKNTAYLQMNSLRAEDTAVYYCARWGHSTSPWAMDYWGQGTLVTVSS

SEQ ID NO: 81 - protein, 108 aa, Artificial Sequence
  Description of Artificial Sequence: Synthetic polypeptide
DIQMTQSPSSLSASVGDRVTITCRASQVIRRSLAWYQQKPGKAPKLLIYAASNLASGVPSRFSGSGSGTDFTLTISSLQPEDFATYYCQQSNTSPLTFGQGTKVEIKR

SEQ ID NO: 82 - protein, 120 aa, Artificial Sequence
  Description of Artificial Sequence: Synthetic polypeptide
EVQLQQSGPELVKPGASVKMSCKASGYTFTSYVINWVKQKPGQGLEWIGLINPYNDGTKYNEKFKVKATLTSDKSSSTAYMELSSLTSEDSAVYYCASYYYGSRYYFDYWGQGTTLTVSS

SEQ ID NO: 83 - protein, 108 aa, Artificial Sequence
  Description of Artificial Sequence: Synthetic polypeptide
DIQMTQSSSYLSVSLGGRVTITCKASDHINNWLAWYQQKPGNAPRLLISGATSLETGVPSRFSGSGSGKDYTLSITSLQTEDVATYYCQQYWSIPLTFGAGTKLELKR

SEQ ID NO: 84 - protein, 120 aa, Artificial Sequence
  Description of Artificial Sequence: Synthetic polypeptide
EVQLQQSGPELEKPGASVKISCKASGYSFTGYNMNWVKQSNGKSLEWIGNIDPYFGGTNYNQKFKGKATLTVDKSSSTAYMQLKSLTSEDSAVYYCARNYDYDGGCFDYWGQGTTLTVSS

SEQ ID NO: 85 - protein, 110 aa, Artificial Sequence
  Description of Artificial Sequence: Synthetic polypeptide
QAVVTQESALTTSPGETVTLTCRSSTGAVTTSNYANWVQEKPDHLFTGLIGGTNNRAPGVPARFSGSLIGDKAALTITGAQTEDEAIYFCALWYSNHWVFGGGTKLTVLG

SEQ ID NO: 86 - protein, 116 aa, Artificial Sequence
  Description of Artificial Sequence: Synthetic polypeptide
QVQLKQSGPGLVQPSQSLSITCTVSGFSLTTYGIHWVRQSPGKGLEWLGVMWSGGDTDYDAAFISRLSISKDNSKSQVFFKMNSLQANDTGIYYCARYRFYGMDYWGQGTSVTVSS

SEQ ID NO: 87 - protein, 108 aa, Artificial Sequence
  Description of Artificial Sequence: Synthetic polypeptide
AIQMTQSSSSFSVSLGDRVTITCKASEDIYNRFAWYQQKPGNAPRLLISGAASLEAGVPSRFSGSGSGQDYTLSITSLQTEDVATYYCQQYWSTPWTFGGGTKLEIKR

SEQ ID NO: 88 - protein, 130 aa, Artificial Sequence
  Description of Artificial Sequence: Synthetic polypeptide
EVQLVQSGAEVKKPGSSVKVSCKASGGTFSSYAISWVRQAPGQGLEWMGGIIPIFGTANYAQKFQGRVTITADKSTSTAYMELSSLRSEDTAVYYCARAPLRFLEWSTQDHYYYYYMDVWGKGTTVTVSS

SEQ ID NO: 89 - protein, 109 aa, Artificial Sequence
  Description of Artificial Sequence: Synthetic polypeptide
SSELTQDPAVSVALGQTVRITCQGDSLRSYYATWYQQKPGQAPILVIYGENKRPSGIPDRFSGSSSGNTASLTITGAQAEDEADYYCKSRDGSGQHLVFGGGTKLTVLG

SEQ ID NO: 90 - protein, 118 aa, Artificial Sequence [sequence omitted]

SEQ ID NO: 91 - protein, 108 aa, Artificial Sequence
  Description of Artificial Sequence: Synthetic polypeptide
EIVLTQSPGTLSVSPGERATLSCRASQSIGSSLHWYQQKPGQAPRLLIKYASQSLSGIPDRFSGSGSGTDFTLTISRLEPEDFAVYYCHQSSRLPHTFGQGTKVEIKR

SEQ ID NO: 92 - protein, 118 aa, Artificial Sequence
  Description of Artificial Sequence: Synthetic polypeptide
EVQLVQSGAEVKKPGESLKISCKGSGYSFTTYWMHWVRQMPGKGLEWMGEINPTNGHTNYNPSFQGQVTISADKSISTAYLQWSSLKASDTAMYYCARNYVGSIFDYWGQGTLVTVSS

SEQ ID NO: 93 - protein, 108 aa, Artificial Sequence
  Description of Artificial Sequence: Synthetic polypeptide
DIQMTQSPSSLSASVGDRVTITCKASENVVSYVSWYQQKPGKAPKLLIYGASNRNTGVPSRFSGSGSGTDFTLTISSLQPEDFATYYCGQSYNYPYTFGQGTKLEIKR

SEQ ID NO: 94 - protein, 119 aa, Artificial Sequence [sequence omitted]

SEQ ID NO: 95 - protein, 108 aa, Artificial Sequence
  Description of Artificial Sequence: Synthetic polypeptide
DIQMTQSPSSLSASVGDRVTITCKASQDVSIGVAWYQQKPGKAPKLLIYSASYRYTGVPSRFSGSGSGTDFTLTISSLQPEDFATYYCQQYYIYPYTFGQGTKVEIKR

SEQ ID NO: 96 - protein, 122 aa, Artificial Sequence [sequence omitted]

SEQ ID NO: 97 - protein, 108 aa, Artificial Sequence
  Description of Artificial Sequence: Synthetic polypeptide
DIQMTQSPSSLSASVGDRVTITCRASQDIRNYLNWYQQKPGKAPKLLIYYTSRLESGVPSRFSGSGSGTDYTLTISSLQPEDFATYYCQQGNTLPWTFGQGTKVEIKR

SEQ ID NO: 98 - protein, 125 aa, Artificial Sequence
  Description of Artificial Sequence: Synthetic polypeptide
EVQLLESGGGLVQPGGSLKLSCAASGFTFNTYAMNWVRQAPGKGLEWVARIRSKYNNYATYYADSVKDRFTISRDDSKNTAYLQMNNLKTEDTAVYYCVRHGNFGNSYVSWFAYWGQGTLVTVSS

SEQ ID NO: 99 - protein, 110 aa, Artificial Sequence
  Description of Artificial Sequence: Synthetic polypeptide
ELVVTQEPSLTVSPGGTVTLTCRSSTGAVTTSNYANWVQQKPGQAPRGLIGGTNKRAPGTPARFSGSLLGGKAALTLSGVQPEDEAEYYCALWYSNLWVFGGGTKLTVLG

SEQ ID NO: 100 - protein, 116 aa, Artificial Sequence
  Description of Artificial Sequence: Synthetic polypeptide
EVQLVESGGGLVQPGKSLKLSCEASGFTFSGYGMHWVRQAPGRGLESVAYITSSSINIKYADAVKGRFTVSRDNAKNLLFLQMNILKSEDTAMYYCARFDWDKNYWGQGTMVTVSS

SEQ ID NO: 101 - protein, 108 aa, Artificial Sequence
  Description of Artificial Sequence: Synthetic polypeptide
DIQMTQSPSSLPASLGDRVTINCQASQDISNYLNWYQQKPGKAPKLLIYYTNKLADGVPSRFSGSGSGRDSSFTISSLESEDIGSYYCQQYYNYPWTFGPGTKLEIKR

SEQ ID NO: 102 - protein, 121 aa, Artificial Sequence
  Description of Artificial Sequence: Synthetic polypeptide
EVKLQESGPGLVAPSQSLSVTCTVSGVSLPDYGVSWIRQPPRKGLEWLGVIWGSEGTTYYNSALKSRLTIIKDNSKSQVPLKMNSLQTDDTAIYYCAKHYYYGGSYAMDYWGQGTSVTVSS

SEQ ID NO: 103 - protein, 108 aa, Artificial Sequence
  Description of Artificial Sequence: Synthetic polypeptide
DIQMTQTTSSLSASLGDRVTISCRASQDISKTLNWYQQKPDGTVKLLIYHTSRLHSGVPSRFSGSGSGTDYSLTISNLEQEDIATYFCQQGNTLPYTFGGGTKLEITR

SEQ ID NO: 104 - protein, 121 aa, Artificial Sequence
  Description of Artificial Sequence: Synthetic polypeptide
EVQLQESGPELVKPGASVKISCKASGYAFSSSWMNWVIQRPGQGLEWIGRIYPGDGDTNYNGKFKGKATLTADKSSSTAYMQLSSLTSVDSAVYFCARSGFITTVLDFDYWGQGTTLTVSS

SEQ ID NO: 105 - protein, 112 aa, Artificial Sequence
  Description of Artificial Sequence: Synthetic polypeptide
DIVLTQSPTSLAVSLGQRATISCRASESVDTFGISFMNWFQQKPGQPPKLLIHAASNQGSGVPSRFSGSGSGTDFSLNIHPMEEDDSAMYFCQQSKEVPFTFGSGTKLEIKR

SEQ ID NO: 106 - protein, 116 aa, Artificial Sequence
  Description of Artificial Sequence: Synthetic polypeptide
EVQLQQSGAELVRPGTSVKLSCKVSGDTITFYYMHFVKQRPGQGLEWIGRIDPEDESTKYSEKFKNKATLTADTSSNTAYLKLSSLTSEDTATYFCIYGGYYFDYWGQGVMVTVSS

SEQ ID NO: 107 - protein, 108 aa, Artificial Sequence
  Description of Artificial Sequence: Synthetic polypeptide
DIQMTQSPASLSTSLGETVTIQCQASEDIYSGLAWYQQKPGKSPQLLIYGASDLQDGVPSRFSGSGSGTQYSLKITSMQTEDEGVYFCQQGLTYPRTFGGGTKLELKR

SEQ ID NO: 108 - protein, 330 aa, Homo sapiens
ASTKGPSVFPLAPSSKSTSGGTAALGCLVKDYFPEPVTVSWNSGALTSGVHTFPAVLQSSGLYSLSSVVTVPSSSLGTQTYICNVNHKPSNTKVDKKVEPKSCDKTHTCPPCPAPELLGGPSVFLFPPKPKDTLMISRTPEVTCVVVDVSHEDPEVKFNWYVDGVEVHNAKTKPREEQYNSTYRVVSVLTVLHQDWLNGKEYKCKVSNKALPAPIEKTISKAKGQPREPQVYTLPPSREEMTKNQVSLTCLVKGFYPSDIAVEWESNGQPENNYKTTPPVLDSDGSFFLYSKLTVDKSRWQQGNVFSCSVMHEALHNHYTQKSLSLSPGK

SEQ ID NO: 109 - protein, 330 aa, Homo sapiens
ASTKGPSVFPLAPSSKSTSGGTAALGCLVKDYFPEPVTVSWNSGALTSGVHTFPAVLQSSGLYSLSSVVTVPSSSLGTQTYICNVNHKPSNTKVDKKVEPKSCDKTHTCPPCPAPEAAGGPSVFLFPPKPKDTLMISRTPEVTCVVVDVSHEDPEVKFNWYVDGVEVHNAKTKPREEQYNSTYRVVSVLTVLHQDWLNGKEYKCKVSNKALPAPIEKTISKAKGQPREPQVYTLPPSREEMTKNQVSLTCLVKGFYPSDIAVEWESNGQPENNYKTTPPVLDSDGSFFLYSKLTVDKSRWQQGNVFSCSVMHEALHNHYTQKSLSLSPGK

SEQ ID NO: 110 - protein, 106 aa, Homo sapiens
TVAAPSVFIFPPSDEQLKSGTASVVCLLNNFYPREAKVQWKVDNALQSGNSQESVTEQDSKDSTYSLSSTLTLSKADYEKHKVYACEVTHQGLSSPVTKSFNRGEC

SEQ ID NO: 111 - protein, 105 aa, Homo sapiens
QPKAAPSVTLFPPSSEELQANKATLVCLISDFYPGAVTVAWKADSSPVKAGVETTTPSKQSNNKYAASSYLSLTPEQWKSHRSYSCQVTHEGSTVEKTVAPTECS

SEQ ID NO: 112 - protein, 251 aa, Artificial Sequence
  Description of Artificial Sequence: Synthetic polypeptide
QVQLQQPGAELVKPGASVKMSCKASGYTFTSYNMHWVKQTPGRGLEWIGAIYPGNGDTSYNQKFKGKATLTADKSSSTAYMQLSSLTSEDSAVYYCARSTYYGGDWYFNVWGAGTTVTVSAASTKGPQVQLQQSGAELVRPGSSVKISCKASGYAFSSYWMNWVKQRPGQGLEWIGQIWPGDGDTNYNGKFKGKATLTADESSSTAYMQLSSLASEDSAVYFCARRETTTVGRYYYAMDYWGQGTSVTVSS

SEQ ID NO: 113 - protein, 224 aa, Artificial Sequence
  Description of Artificial Sequence: Synthetic polypeptide
QIVLSQSPAILSPSPGEKVTMTCRASSSVSYIHWFQQKPGSSPKPWIYATSNLASGVPVRFSGSGSGTSYSLTISRVEAEDAATYYCQQWTSNPPTFGGGTKLEIKRTVAAPDILLTQTPASLAVSLGQRATISCKASQSVDYDGDSYLNWYQQIPGQPPKLLIYDASNLVSGIPPRFSGSGSGTDFTLNIHPVEKVDAATYHCQQSTEDPWTFGGGTKLEIKR

SEQ ID NO: 114 - protein, 251 aa, Artificial Sequence
  Description of Artificial Sequence: Synthetic polypeptide
QVQLQQSGAELVRPGSSVKISCKASGYAFSSYWMNWVKQRPGQGLEWIGQIWPGDGDTNYNGKFKGKATLTADESSSTAYMQLSSLASEDSAVYFCARRETTTVGRYYYAMDYWGQGTSVTVSSASTKGPQVQLQQPGAELVKPGASVKMSCKASGYTFTSYNMHWVKQTPGRGLEWIGAIYPGNGDTSYNQKFKGKATLTADKSSSTAYMQLSSLTSEDSAVYYCARSTYYGGDWYFNVWGAGTTVTVSA

SEQ ID NO: 115 - protein, 224 aa, Artificial Sequence
  Description of Artificial Sequence: Synthetic polypeptide
DILLTQTPASLAVSLGQRATISCKASQSVDYDGDSYLNWYQQIPGQPPKLLIYDASNLVSGIPPRFSGSGSGTDFTLNIHPVEKVDAATYHCQQSTEDPWTFGGGTKLEIKRTVAAPQIVLSQSPAILSPSPGEKVTMTCRASSSVSYIHWFQQKPGSSPKPWIYATSNLASGVPVRFSGSGSGTSYSLTISRVEAEDAATYYCQQWTSNPPTFGGGTKLEIKR

SEQ ID NO: 116 - protein, 246 aa, Artificial Sequence
  Description of Artificial Sequence: Synthetic polypeptide
QVQLQQPGAELVKPGASVKMSCKASGYTFTSYNMHWVKQTPGRGLEWIGAIYPGNGDTSYNQKFKGKATLTADKSSSTAYMQLSSLTSEDSAVYYCARSTYYGGDWYFNVWGAGTTVTVSAASTKGPQVQLQQSGAELARPGASVKMSCKASGYTFTRYTMHWVKQRPGQGLEWIGYINPSRGYTNYNQKFKDKATLTTDKSSSTAYMQLSSLTSEDSAVYYCARYYDDHYCLDYWGQGTTLTVSS

SEQ ID NO: 117 - protein, 219 aa, Artificial Sequence
  Description of Artificial Sequence: Synthetic polypeptide
QIVLSQSPAILSPSPGEKVTMTCRASSSVSYIHWFQQKPGSSPKPWIYATSNLASGVPVRFSGSGSGTSYSLTISRVEAEDAATYYCQQWTSNPPTFGGGTKLEIKRTVAAPQIVLTQSPAIMSASPGEKVTMTCRASSSVSYMNWYQQKSGTSPKRWIYDTSKVASGVPYRFSGSGSGTSYSLTISSMEAEDAATYYCQQWSSNPLTFGSGTKLEINR

SEQ ID NO: 118 - protein, 246 aa, Artificial Sequence
  Description of Artificial Sequence: Synthetic polypeptide
QVQLQQSGAELARPGASVKMSCKASGYTFTRYTMHWVKQRPGQGLEWIGYINPSRGYTNYNQKFKDKATLTTDKSSSTAYMQLSSLTSEDSAVYYCARYYDDHYCLDYWGQGTTLTVSSASTKGPQVQLQQPGAELVKPGASVKMSCKASGYTFTSYNMHWVKQTPGRGLEWIGAIYPGNGDTSYNQKFKGKATLTADKSSSTAYMQLSSLTSEDSAVYYCARSTYYGGDWYFNVWGAGTTVTVSA

SEQ ID NO: 119 - protein, 219 aa, Artificial Sequence
  Description of Artificial Sequence: Synthetic polypeptide
QIVLTQSPAIMSASPGEKVTMTCRASSSVSYMNWYQQKSGTSPKRWIYDTSKVASGVPYRFSGSGSGTSYSLTISSMEAEDAATYYCQQWSSNPLTFGSGTKLEINRTVAAPQIVLSQSPAILSPSPGEKVTMTCRASSSVSYIHWFQQKPGSSPKPWIYATSNLASGVPVRFSGSGSGTSYSLTISRVEAEDAATYYCQQWTSNPPTFGGGTKLEIKR

SEQ ID NO: 120 - protein, 254 aa, Artificial Sequence
  Description of Artificial Sequence: Synthetic polypeptide
QVQLQQPGAELVKPGASVKMSCKASGYTFTSYNMHWVKQTPGRGLEWIGAIYPGNGDTSYNQKFKGKATLTADKSSSTAYMQLSSLTSEDSAVYYCARSTYYGGDWYFNVWGAGTTVTVSAASTKGPQVQLQESGPGLVKPSETLSLTCAVSGGSISGGYGWGWIRQPPGKGLEWIGSFYSSSGNTYYNPSLKSQVTISTDTSKNQFSLKLNSMTAADTAVYYCVRDRLFSVVGMVYNNWFDVWGPGVLVTVSS

SEQ ID NO: 121 - protein, 223 aa, Artificial Sequence
  Description of Artificial Sequence: Synthetic polypeptide
QIVLSQSPAILSPSPGEKVTMTCRASSSVSYIHWFQQKPGSSPKPWIYATSNLASGVPVRFSGSGSGTSYSLTISRVEAEDAATYYCQQWTSNPPTFGGGTKLEIKRTVAAPESALTQPPSVSGAPGQKVTISCTGSTSNIGGYDLHWYQQLPGTAPKLLIYDINKRPSGISDRFSGSKSGTAASLAITGLQTEDEADYYCQSYDSSLNAQVFGGGTRLTVLG

SEQ ID NO: 122 - protein, 254 aa, Artificial Sequence
  Description of Artificial Sequence: Synthetic polypeptide
QVQLQESGPGLVKPSETLSLTCAVSGGSISGGYGWGWIRQPPGKGLEWIGSFYSSSGNTYYNPSLKSQVTISTDTSKNQFSLKLNSMTAADTAVYYCVRDRLFSVVGMVYNNWFDVWGPGVLVTVSSASTKGPQVQLQQPGAELVKPGASVKMSCKASGYTFTSYNMHWVKQTPGRGLEWIGAIYPGNGDTSYNQKFKGKATLTADKSSSTAYMQLSSLTSEDSAVYYCARSTYYGGDWYFNVWGAGTTVTVSA

SEQ ID NO: 123 - protein, 224 aa, Artificial Sequence
  Description of Artificial Sequence: Synthetic polypeptide
ESALTQPPSVSGAPGQKVTISCTGSTSNIGGYDLHWYQQLPGTAPKLLIYDINKRPSGISDRFSGSKSGTAASLAITGLQTEDEADYYCQSYDSSLNAQVFGGGTRLTVLGQPKAAPQIVLSQSPAILSPSPGEKVTMTCRASSSVSYIHWFQQKPGSSPKPWIYATSNLASGVPVRFSGSGSGTSYSLTISRVEAEDAATYYCQQWTSNPPTFGGGTKLEIKR

SEQ ID NO: 124 - protein, 243 aa, Artificial Sequence
  Description of Artificial Sequence: Synthetic polypeptide
QVQLQQPGAELVKPGASVKMSCKASGYTFTSYNMHWVKQTPGRGLEWIGAIYPGNGDTSYNQKFKGKATLTADKSSSTAYMQLSSLTSEDSAVYYCARSTYYGGDWYFNVWGAGTTVTVSAASTKGPQVQLVQSGAEVKKPGSSVKVSCKASGYTFTSYWLHWVRQAPGQGLEWIGYINPRNDYTEYNQNFKDKATITADESTNTAYMELSSLRSEDTAFYFCARRDITTFYWGQGTTVTVSS

SEQ ID NO: 125 - protein, 225 aa, Artificial Sequence
  Description of Artificial Sequence: Synthetic polypeptide
QIVLSQSPAILSPSPGEKVTMTCRASSSVSYIHWFQQKPGSSPKPWIYATSNLASGVPVRFSGSGSGTSYSLTISRVEAEDAATYYCQQWTSNPPTFGGGTKLEIKRTVAAPDIQLTQSPSSLSASVGDRVTMSCKSSQSVLYSANHKNYLAWYQQKPGKAPKLLIYWASTRESGVPSRFSGSGSGTDFTFTISSLQPEDIATYYCHQYLSSWTFGGGTKLEIKR

SEQ ID NO: 126 - protein, 243 aa, Artificial Sequence
  Description of Artificial Sequence: Synthetic polypeptide
QVQLVQSGAEVKKPGSSVKVSCKASGYTFTSYWLHWVRQAPGQGLEWIGYINPRNDYTEYNQNFKDKATITADESTNTAYMELSSLRSEDTAFYFCARRDITTFYWGQGTTVTVSSASTKGPQVQLQQPGAELVKPGASVKMSCKASGYTFTSYNMHWVKQTPGRGLEWIGAIYPGNGDTSYNQKFKGKATLTADKSSSTAYMQLSSLTSEDSAVYYCARSTYYGGDWYFNVWGAGTTVTVSA

SEQ ID NO: 127 - protein, 225 aa, Artificial Sequence
  Description of Artificial Sequence: Synthetic polypeptide
DIQLTQSPSSLSASVGDRVTMSCKSSQSVLYSANHKNYLAWYQQKPGKAPKLLIYWASTRESGVPSRFSGSGSGTDFTFTISSLQPEDIATYYCHQYLSSWTFGGGTKLEIKRTVAAPQIVLSQSPAILSPSPGEKVTMTCRASSSVSYIHWFQQKPGSSPKPWIYATSNLASGVPVRFSGSGSGTSYSLTISRVEAEDAATYYCQQWTSNPPTFGGGTKLEIKR

SEQ ID NO: 128 - protein, 247 aa, Artificial Sequence
  Description of Artificial Sequence: Synthetic polypeptide
QVQLQQPGAELVKPGASVKMSCKASGYTFTSYNMHWVKQTPGRGLEWIGAIYPGNGDTSYNQKFKGKATLTADKSSSTAYMQLSSLTSEDSAVYYCARSTYYGGDWYFNVWGAGTTVTVSAASTKGPQVQLVESGGGVVQPGRSLRLSCAASGFTFSSYGMHWVRQAPGKGLEWVAVISYEESNRYHADSVKGRFTISRDNSKITLYLQMNSLRTEDTAVYYCARDGGIAAPGPDYWGQGTLVTVSS

SEQ ID NO: 129 - protein, 225 aa, Artificial Sequence
  Description of Artificial Sequence: Synthetic polypeptide
QIVLSQSPAILSPSPGEKVTMTCRASSSVSYIHWFQQKPGSSPKPWIYATSNLASGVPVRFSGSGSGTSYSLTISRVEAEDAATYYCQQWTSNPPTFGGGTKLEIKRTVAAPDIVMTQSPLSLTVTPGEPASISCRSSQSLLYSNGYNYLDWYLQKPGQSPQVLISLGSNRASGVPDRFSGSGSGTDFTLKISRVEAEDVGVYYCMQARQTPFTFGPGTKVDIRR

SEQ ID NO: 130 - protein, 247 aa, Artificial Sequence
  Description of Artificial Sequence: Synthetic polypeptide
QVQLVESGGGVVQPGRSLRLSCAASGFTFSSYGMHWVRQAPGKGLEWVAVISYEESNRYHADSVKGRFTISRDNSKITLYLQMNSLRTEDTAVYYCARDGGIAAPGPDYWGQGTLVTVSSASTKGPQVQLQQPGAELVKPGASVKMSCKASGYTFTSYNMHWVKQTPGRGLEWIGAIYPGNGDTSYNQKFKGKATLTADKSSSTAYMQLSSLTSEDSAVYYCARSTYYGGDWYFNVWGAGTTVTVSA

SEQ ID NO: 131 - protein, 225 aa, Artificial Sequence
  Description of Artificial Sequence: Synthetic polypeptide
DIVMTQSPLSLTVTPGEPASISCRSSQSLLYSNGYNYLDWYLQKPGQSPQVLISLGSNRASGVPDRFSGSGSGTDFTLKISRVEAEDVGVYYCMQARQTPFTFGPGTKVDIRRTVAAPQIVLSQSPAILSPSPGEKVTMTCRASSSVSYIHWFQQKPGSSPKPWIYATSNLASGVPVRFSGSGSGTSYSLTISRVEAEDAATYYCQQWTSNPPTFGGGTKLEIKR

SEQ ID NO: 132 - protein, 245 aa, Artificial Sequence
  Description of Artificial Sequence: Synthetic polypeptide
QVQLQQSGAELARPGASVKMSCKASGYTFTRYTMHWVKQRPGQGLEWIGYINPSRGYTNYNQKFKDKATLTTDKSSSTAYMQLSSLTSEDSAVYYCARYYDDHYCLDYWGQGTTLTVSSASTKGPEVQLVESGGGLVQPGGSLRLSCAASGFNIKDTYIHWVRQAPGKGLEWVARIYPTNGYTRYADSVKGRFTISADTSKNTAYLQMNSLRAEDTAVYYCSRWGGDGFYAMDYWGQGTLVTVSS

SEQ ID NO: 133 - protein, 220 aa, Artificial Sequence
  Description of Artificial Sequence: Synthetic polypeptide
QIVLTQSPAIMSASPGEKVTMTCRASSSVSYMNWYQQKSGTSPKRWIYDTSKVASGVPYRFSGSGSGTSYSLTISSMEAEDAATYYCQQWSSNPLTFGSGTKLEINRTVAAPDIQMTQSPSSLSASVGDRVTITCRASQDVNTAVAWYQQKPGKAPKLLIYSASFLYSGVPSRFSGSRSGTDFTLTISSLQPEDFATYYCQQHYTTPPTFGQGTKVEIKR

SEQ ID NO: 134 - protein, 245 aa, Artificial Sequence
  Description of Artificial Sequence: Synthetic polypeptide
EVQLVESGGGLVQPGGSLRLSCAASGFNIKDTYIHWVRQAPGKGLEWVARIYPTNGYTRYADSVKGRFTISADTSKNTAYLQMNSLRAEDTAVYYCSRWGGDGFYAMDYWGQGTLVTVSSASTKGPQVQLQQSGAELARPGASVKMSCKASGYTFTRYTMHWVKQRPGQGLEWIGYINPSRGYTNYNQKFKDKATLTTDKSSSTAYMQLSSLTSEDSAVYYCARYYDDHYCLDYWGQGTTLTVSS

SEQ ID NO: 135 - protein, 220 aa, Artificial Sequence
  Description of Artificial Sequence: Synthetic polypeptide
DIQMTQSPSSLSASVGDRVTITCRASQDVNTAVAWYQQKPGKAPKLLIYSASFLYSGVPSRFSGSRSGTDFTLTISSLQPEDFATYYCQQHYTTPPTFGQGTKVEIKRTVAAPQIVLTQSPAIMSASPGEKVTMTCRASSSVSYMNWYQQKSGTSPKRWIYDTSKVASGVPYRFSGSGSGTSYSLTISSMEAEDAATYYCQQWSSNPLTFGSGTKLEINR

SEQ ID NO: 136 - protein, 249 aa, Artificial Sequence
  Description of Artificial Sequence: Synthetic polypeptide
QVQLQQSGAELARPGASVKMSCKASGYTFTRYTMHWVKQRPGQGLEWIGYINPSRGYTNYNQKFKDKATLTTDKSSSTAYMQLSSLTSEDSAVYYCARYYDDHYCLDYWGQGTTLTVSSASTKGPQVQLQQSGAELVRPGSSVKISCKASGYAFSSYWMNWVKQRPGQGLEWIGQIWPGDGDTNYNGKFKGKATLTADESSSTAYMQLSSLASEDSAVYFCARRETTTVGRYYYAMDYWGQGTSVTVSS

SEQ ID NO: 137 - protein, 224 aa, Artificial Sequence
  Description of Artificial Sequence: Synthetic polypeptide
QIVLTQSPAIMSASPGEKVTMTCRASSSVSYMNWYQQKSGTSPKRWIYDTSKVASGVPYRFSGSGSGTSYSLTISSMEAEDAATYYCQQWSSNPLTFGSGTKLEINRTVAAPDILLTQTPASLAVSLGQRATISCKASQSVDYDGDSYLNWYQQIPGQPPKLLIYDASNLVSGIPPRFSGSGSGTDFTLNIHPVEKVDAATYHCQQSTEDPWTFGGGTKLEIKR

SEQ ID NO: 138 - protein, 249 aa, Artificial Sequence
  Description of Artificial Sequence: Synthetic polypeptide
QVQLQQSGAELVRPGSSVKISCKASGYAFSSYWMNWVKQRPGQGLEWIGQIWPGDGDTNYNGKFKGKATLTADESSSTAYMQLSSLASEDSAVYFCARRETTTVGRYYYAMDYWGQGTSVTVSSASTKGPQVQLQQSGAELARPGASVKMSCKASGYTFTRYTMHWVKQRPGQGLEWIGYINPSRGYTNYNQKFKDKATLTTDKSSSTAYMQLSSLTSEDSAVYYCARYYDDHYCLDYWGQGTTLTVSS

SEQ ID NO: 139 - protein, 224 aa, Artificial Sequence
  Description of Artificial Sequence: Synthetic polypeptide
DILLTQTPASLAVSLGQRATISCKASQSVDYDGDSYLNWYQQIPGQPPKLLIYDASNLVSGIPPRFSGSGSGTDFTLNIHPVEKVDAATYHCQQSTEDPWTFGGGTKLEIKRTVAAPQIVLTQSPAIMSASPGEKVTMTCRASSSVSYMNWYQQKSGTSPKRWIYDTSKVASGVPYRFSGSGSGTSYSLTISSMEAEDAATYYCQQWSSNPLTFGSGTKLEINR

SEQ ID NO: 140 - protein, 245 aa, Artificial Sequence
  Description of Artificial Sequence: Synthetic polypeptide
QVQLKQSGPGLVQPSQSLSITCTVSGFSLTNYGVHWVRQSPGKGLEWLGVIWSGGNTDYNTPFTSRLSINKDNSKSQVFFKMNSLQSNDTAIYYCARALTYYDYEFAYWGQGTLVTVSAASTKGPEVQLVESGGGLVQPGGSLRLSCAASGFNIKDTYIHWVRQAPGKGLEWVARIYPTNGYTRYADSVKGRFTISADTSKNTAYLQMNSLRAEDTAVYYCSRWGGDGFYAMDYWGQGTLVTVSS

SEQ ID NO: 141 - protein, 221 aa, Artificial Sequence
  Description of Artificial Sequence: Synthetic polypeptide
DILLTQSPVILSVSPGERVSFSCRASQSIGTNIHWYQQRTNGSPRLLIKYASESISGIPSRFSGSGSGTDFTLSINSVESEDIADYYCQQNNNWPTTFGAGTKLELKRTVAAPDIQMTQSPSSLSASVGDRVTITCRASQDVNTAVAWYQQKPGKAPKLLIYSASFLYSGVPSRFSGSRSGTDFTLTISSLQPEDFATYYCQQHYTTPPTFGQGTKVEIKR

SEQ ID NO: 142 - protein, 245 aa, Artificial Sequence
  Description of Artificial Sequence: Synthetic polypeptide
EVQLVESGGGLVQPGGSLRLSCAASGFNIKDTYIHWVRQAPGKGLEWVARIYPTNGYTRYADSVKGRFTISADTSKNTAYLQMNSLRAEDTAVYYCSRWGGDGFYAMDYWGQGTLVTVSSASTKGPQVQLKQSGPGLVQPSQSLSITCTVSGFSLTNYGVHWVRQSPGKGLEWLGVIWSGGNTDYNTPFTSRLSINKDNSKSQVFFKMNSLQSNDTAIYYCARALTYYDYEFAYWGQGTLVTVSA

SEQ ID NO: 143 - protein, 221 aa, Artificial Sequence
  Description of Artificial Sequence: Synthetic polypeptide
DIQMTQSPSSLSASVGDRVTITCRASQDVNTAVAWYQQKPGKAPKLLIYSASFLYSGVPSRFSGSRSGTDFTLTISSLQPEDFATYYCQQHYTTPPTFGQGTKVEIKRTVAAPDILLTQSPVILSVSPGERVSFSCRASQSIGTNIHWYQQRTNGSPRLLIKYASESISGIPSRFSGSGSGTDFTLSINSVESEDIADYYCQQNNNWPTTFGAGTKLELKR

SEQ ID NO: 144 - protein, 244 aa, Artificial Sequence
  Description of Artificial Sequence: Synthetic polypeptide
QVQLKQSGPGLVQPSQSLSITCTVSGFSLTNYGVHWVRQSPGKGLEWLGVIWSGGNTDYNTPFTSRLSINKDNSKSQVFFKMNSLQSNDTAIYYCARALTYYDYEFAYWGQGTLVTVSAASTKGPQVQLQQSGAELARPGASVKMSCKASGYTFTRYTMHWVKQRPGQGLEWIGYINPSRGYTNYNQKFKDKATLTTDKSSSTAYMQLSSLTSEDSAVYYCARYYDDHYCLDYWGQGTTLTVSS

SEQ ID NO: 145 - protein, 220 aa, Artificial Sequence
  Description of Artificial Sequence: Synthetic polypeptide
DILLTQSPVILSVSPGERVSFSCRASQSIGTNIHWYQQRTNGSPRLLIKYASESISGIPSRFSGSGSGTDFTLSINSVESEDIADYYCQQNNNWPTTFGAGTKLELKRTVAAPQIVLTQSPAIMSASPGEKVTMTCRASSSVSYMNWYQQKSGTSPKRWIYDTSKVASGVPYRFSGSGSGTSYSLTISSMEAEDAATYYCQQWSSNPLTFGSGTKLEINR

SEQ ID NO: 146 - protein, 244 aa, Artificial Sequence
  Description of Artificial Sequence: Synthetic polypeptide
QVQLQQSGAELARPGASVKMSCKASGYTFTRYTMHWVKQRPGQGLEWIGYINPSRGYTNYNQKFKDKATLTTDKSSSTAYMQLSSLTSEDSAVYYCARYYDDHYCLDYWGQGTTLTVSSASTKGPQVQLKQSGPGLVQPSQSLSITCTVSGFSLTNYGVHWVRQSPGKGLEWLGVIWSGGNTDYNTPFTSRLSINKDNSKSQVFFKMNSLQSNDTAIYYCARALTYYDYEFAYWGQGTLVTVSA

SEQ ID NO: 147 - protein, 220 aa, Artificial Sequence
  Description of Artificial Sequence: Synthetic polypeptide
QIVLTQSPAIMSASPGEKVTMTCRASSSVSYMNWYQQKSGTSPKRWIYDTSKVASGVPYRFSGSGSGTSYSLTISSMEAEDAATYYCQQWSSNPLTFGSGTKLEINRTVAAPDILLTQSPVILSVSPGERVSFSCRASQSIGTNIHWYQQRTNGSPRLLIKYASESISGIPSRFSGSGSGTDFTLSINSVESEDIADYYCQQNNNWPTTFGAGTKLELKR

SEQ ID NO: 148 - protein, 245 aa, Artificial Sequence
  Description of Artificial Sequence: Synthetic polypeptide
QVQLKQSGPGLVQPSQSLSITCTVSGFSLTNYGVHWVRQSPGKGLEWLGVIWSGGNTDYNTPFTSRLSINKDNSKSQVFFKMNSLQSNDTAIYYCARALTYYDYEFAYWGQGTLVTVSAASTKGPQVQLVQSGAEVKKPGASVKVSCKASGYTFTSYDINWVRQATGQGLEWMGWMNPNSGNTGYAQKFQGRVTMTRNTSISTAYMELSSLRSEDTAVYYCARDPYYYYYGMDVWGQGTTVTVSS

SEQ ID NO: 149 - protein, 225 aa, Artificial Sequence
  Description of Artificial Sequence: Synthetic polypeptide
DILLTQSPVILSVSPGERVSFSCRASQSIGTNIHWYQQRTNGSPRLLIKYASESISGIPSRFSGSGSGTDFTLSINSVESEDIADYYCQQNNNWPTTFGAGTKLELKRTVAAPQSVLTQPPSVSAAPGQKVTISCSGSSSNIENNHVSWYQQLPGTAPKLLIYDNNKRPSGIPDRFSGSKSGTSATLGITGLQTGDEADYYCETWDTSLSAGRVFGGGTKLTVLG

SEQ ID NO: 150 - protein, 245 aa, Artificial Sequence
  Description of Artificial Sequence: Synthetic polypeptide
QVQLVQSGAEVKKPGASVKVSCKASGYTFTSYDINWVRQATGQGLEWMGWMNPNSGNTGYAQKFQGRVTMTRNTSISTAYMELSSLRSEDTAVYYCARDPYYYYYGMDVWGQGTTVTVSSASTKGPQVQLKQSGPGLVQPSQSLSITCTVSGFSLTNYGVHWVRQSPGKGLEWLGVIWSGGNTDYNTPFTSRLSINKDNSKSQVFFKMNSLQSNDTAIYYCARALTYYDYEFAYWGQGTLVTVSA

SEQ ID NO: 151 - protein, 226 aa, Artificial Sequence
  Description of Artificial Sequence: Synthetic polypeptide
QSVLTQPPSVSAAPGQKVTISCSGSSSNIENNHVSWYQQLPGTAPKLLIYDNNKRPSGIPDRFSGSKSGTSATLGITGLQTGDEADYYCETWDTSLSAGRVFGGGTKLTVLGQPKAAPDILLTQSPVILSVSPGERVSFSCRASQSIGTNIHWYQQRTNGSPRLLIKYASESISGIPSRFSGSGSGTDFTLSINSVESEDIADYYCQQNNNWPTTFGAGTKLELKR

SEQ ID NO: 152 - protein, 250 aa, Artificial Sequence
  Description of Artificial Sequence: Synthetic polypeptide
QVQLKQSGPGLVQPSQSLSITCTVSGFSLTNYGVHWVRQSPGKGLEWLGVIWSGGNTDYNTPFTSRLSINKDNSKSQVFFKMNSLQSNDTAIYYCARALTYYDYEFAYWGQGTLVTVSAASTKGPEVQLLESGGGLVQPGGSLRLSCTASGFTFSSYAMNWVRQAPGKGLEWVSAISGSGGTTFYADSVKGRFTISRDNSRTTLYLQMNSLRAEDTAVYYCAKDLGWSDSYYYYYGMDVWGQGTTVTVSS

SEQ ID NO: 153 - protein, 221 aa, Artificial Sequence
  Description of Artificial Sequence: Synthetic polypeptide
DILLTQSPVILSVSPGERVSFSCRASQSIGTNIHWYQQRTNGSPRLLIKYASESISGIPSRFSGSGSGTDFTLSINSVESEDIADYYCQQNNNWPTTFGAGTKLELKRTVAAPDIQMTQFPSSLSASVGDRVTITCRASQGIRNDLGWYQQKPGKAPKRLIYAASRLHRGVPSRFSGSGSGTEFTLTISSLQPEDFATYYCLQHNSYPCSFGQGTKLEIKR

SEQ ID NO: 154 - protein, 250 aa, Artificial Sequence
  Description of Artificial Sequence: Synthetic polypeptide
EVQLLESGGGLVQPGGSLRLSCTASGFTFSSYAMNWVRQAPGKGLEWVSAISGSGGTTFYADSVKGRFTISRDNSRTTLYLQMNSLRAEDTAVYYCAKDLGWSDSYYYYYGMDVWGQGTTVTVSSASTKGPQVQLKQSGPGLVQPSQSLSITCTVSGFSLTNYGVHWVRQSPGKGLEWLGVIWSGGNTDYNTPFTSRLSINKDNSKSQVFFKMNSLQSNDTAIYYCARALTYYDYEFAYWGQGTLVTVSA

SEQ ID NO: 155 - protein, 221 aa, Artificial Sequence
  Description of Artificial Sequence: Synthetic polypeptide
DIQMTQFPSSLSASVGDRVTITCRASQGIRNDLGWYQQKPGKAPKRLIYAASRLHRGVPSRFSGSGSGTEFTLTISSLQPEDFATYYCLQHNSYPCSFGQGTKLEIKRTVAAPDILLTQSPVILSVSPGERVSFSCRASQSIGTNIHWYQQRTNGSPRLLIKYASESISGIPSRFSGSGSGTDFTLSINSVESEDIADYYCQQNNNWPTTFGAGTKLELKR

SEQ ID NO: 156 - protein, 257 aa, Artificial Sequence
  Description of Artificial Sequence: Synthetic polypeptide
EVQLLESGGGLVQPGGSLRLSCTASGFTFSSYAMNWVRQAPGKGLEWVSAISGSGGTTFYADSVKGRFTISRDNSRTTLYLQMNSLRAEDTAVYYCAKDLGWSDSYYYYYGMDVWGQGTTVTVSSASTKGPSVFPLAPQVQLKQSGPGLVQPSQSLSITCTVSGFSLTNYGVHWVRQSPGKGLEWLGVIWSGGNTDYNTPFTSRLSINKDNSKSQVFFKMNSLQSNDTAIYYCARALTYYDYEFAYWGQGTLVTVSA

SEQ ID NO: 157 - protein, 228 aa, Artificial Sequence
  Description of Artificial Sequence: Synthetic polypeptide
DIQMTQFPSSLSASVGDRVTITCRASQGIRNDLGWYQQKPGKAPKRLIYAASRLHRGVPSRFSGSGSGTEFTLTISSLQPEDFATYYCLQHNSYPCSFGQGTKLEIKRTVAAPSVFIFPPDILLTQSPVILSVSPGERVSFSCRASQSIGTNIHWYQQRTNGSPRLLIKYASESISGIPSRFSGSGSGTDFTLSINSVESEDIADYYCQQNNNWPTTFGAGTKLELKR

SEQ ID NO: 158 - protein, 257 aa, Artificial Sequence
  Description of Artificial Sequence: Synthetic polypeptide
QVQLKQSGPGLVQPSQSLSITCTVSGFSLTNYGVHWVRQSPGKGLEWLGVIWSGGNTDYNTPFTSRLSINKDNSKSQVFFKMNSLQSNDTAIYYCARALTYYDYEFAYWGQGTLVTVSAASTKGPSVFPLAPEVQLLESGGGLVQPGGSLRLSCTASGFTFSSYAMNWVRQAPGKGLEWVSAISGSGGTTFYADSVKGRFTISRDNSRTTLYLQMNSLRAEDTAVYYCAKDLGWSDSYYYYYGMDVWGQGTTVTVSS

SEQ ID NO: 159 - protein, 228 aa, Artificial Sequence
  Description of Artificial Sequence: Synthetic polypeptide
DILLTQSPVILSVSPGERVSFSCRASQSIGTNIHWYQQRTNGSPRLLIKYASESISGIPSRFSGSGSGTDFTLSINSVESEDIADYYCQQNNNWPTTFGAGTKLELKRTVAAPSVFIFPPDIQMTQFPSSLSASVGDRVTITCRASQGIRNDLGWYQQKPGKAPKRLIYAASRLHRGVPSRFSGSGSGTEFTLTISSLQPEDFATYYCLQHNSYPCSFGQGTKLEIKR

SEQ ID NO: 160 - protein, 257 aa, Artificial Sequence; identical to SEQ ID NO: 156
  Description of Artificial Sequence: Synthetic polypeptide

SEQ ID NO: 161 - protein, 221 aa, Artificial Sequence; identical to SEQ ID NO: 155
  Description of Artificial Sequence: Synthetic polypeptide

SEQ ID NO: 162 - protein, 257 aa, Artificial Sequence; identical to SEQ ID NO: 158
  Description of Artificial Sequence: Synthetic polypeptide

SEQ ID NO: 163 - protein, 221 aa, Artificial Sequence; identical to SEQ ID NO: 153
  Description of Artificial Sequence: Synthetic polypeptide

SEQ ID NO: 164 - protein, 250 aa, Artificial Sequence; identical to SEQ ID NO: 154
  Description of Artificial Sequence: Synthetic polypeptide

SEQ ID NO: 165 - protein, 228 aa, Artificial Sequence; identical to SEQ ID NO: 157
  Description of Artificial Sequence: Synthetic polypeptide

SEQ ID NO: 166 - protein, 250 aa, Artificial Sequence; identical to SEQ ID NO: 152
  Description of Artificial Sequence: Synthetic polypeptide

SEQ ID NO: 167 - protein, 228 aa, Artificial Sequence; identical to SEQ ID NO: 159
  Description of Artificial Sequence: Synthetic polypeptide

SEQ ID NO: 168 - protein, 255 aa, Artificial Sequence
  Description of Artificial Sequence: Synthetic polypeptide
EVQLVQSGAEVKKPGSSVKVSCKASGGTFSSYAISWVRQAPGQGLEWMGGIIPIFGTANYAQKFQGRVTITADKSTSTAYMELSSLRSEDTAVYYCARAPLRFLEWSTQDHYYYYYMDVWGKGTTVTVSSASTKGPQVQLKQSGPGLVQPSQSLSITCTVSGFSLTNYGVHWVRQSPGKGLEWLGVIWSGGNTDYNTPFTSRLSINKDNSKSQVFFKMNSLQSNDTAIYYCARALTYYDYEFAYWGQGTLVTVSA

SEQ ID NO: 169 - protein, 223 aa, Artificial Sequence
  Description of Artificial Sequence: Synthetic polypeptide
SSELTQDPAVSVALGQTVRITCQGDSLRSYYATWYQQKPGQAPILVIYGENKRPSGIPDRFSGSSSGNTASLTITGAQAEDEADYYCKSRDGSGQHLVFGGGTKLTVLGQPKAAPDILLTQSPVILSVSPGERVSFSCRASQSIGTNIHWYQQRTNGSPRLLIKYASESISGIPSRFSGSGSGTDFTLSINSVESEDIADYYCQQNNNWPTTFGAGTKLELKR

SEQ ID NO: 170 - protein, 255 aa, Artificial Sequence
  Description of Artificial Sequence: Synthetic polypeptide
QVQLKQSGPGLVQPSQSLSITCTVSGFSLTNYGVHWVRQSPGKGLEWLGVIWSGGNTDYNTPFTSRLSINKDNSKSQVFFKMNSLQSNDTAIYYCARALTYYDYEFAYWGQGTLVTVSAASTKGPEVQLVQSGAEVKKPGSSVKVSCKASGGTFSSYAISWVRQAPGQGLEWMGGIIPIFGTANYAQKFQGRVTITADKSTSTAYMELSSLRSEDTAVYYCARAPLRFLEWSTQDHYYYYYMDVWGKGTTVTVSS

SEQ ID NO: 171 - protein, 222 aa, Artificial Sequence
  Description of Artificial Sequence: Synthetic polypeptide
DILLTQSPVILSVSPGERVSFSCRASQSIGTNIHWYQQRTNGSPRLLIKYASESISGIPSRFSGSGSGTDFTLSINSVESEDIADYYCQQNNNWPTTFGAGTKLELKRTVAAPSSELTQDPAVSVALGQTVRITCQGDSLRSYYATWYQQKPGQAPILVIYGENKRPSGIPDRFSGSSSGNTASLTITGAQAEDEADYYCKSRDGSGQHLVFGGGTKLTVLG

SEQ ID NO: 172 - protein, 262 aa, Artificial Sequence
  Description of Artificial Sequence: Synthetic polypeptide
EVQLVQSGAEVKKPGSSVKVSCKASGGTFSSYAISWVRQAPGQGLEWMGGIIPIFGTANYAQKFQGRVTITADKSTSTAYMELSSLRSEDTAVYYCARAPLRFLEWSTQDHYYYYYMDVWGKGTTVTVSSASTKGPSVFPLAPQVQLKQSGPGLVQPSQSLSITCTVSGFSLTNYGVHWVRQSPGKGLEWLGVIWSGGNTDYNTPFTSRLSINKDNSKSQVFFKMNSLQSNDTAIYYCARALTYYDYEFAYWGQGTLVTVSA

SEQ ID NO: 173 - protein, 230 aa, Artificial Sequence
  Description of Artificial Sequence: Synthetic polypeptide
SSELTQDPAVSVALGQTVRITCQGDSLRSYYATWYQQKPGQAPILVIYGENKRPSGIPDRFSGSSSGNTASLTITGAQAEDEADYYCKSRDGSGQHLVFGGGTKLTVLGQPKAAPSVTLFPPDILLTQSPVILSVSPGERVSFSCRASQSIGTNIHWYQQRTNGSPRLLIKYASESISGIPSRFSGSGSGTDFTLSINSVESEDIADYYCQQNNNWPTTFGAGTKLELKR

SEQ ID NO: 174 - protein, 262 aa, Artificial Sequence
  Description of Artificial Sequence: Synthetic polypeptide
QVQLKQSGPGLVQPSQSLSITCTVSGFSLTNYGVHWVRQSPGKGLEWLGVIWSGGNTDYNTPFTSRLSINKDNSKSQVFFKMNSLQSNDTAIYYCARALTYYDYEFAYWGQGTLVTVSAASTKGPSVFPLAPEVQLVQSGAEVKKPGSSVKVSCKASGGTFSSYAISWVRQAPGQGLEWMGGIIPIFGTANYAQKFQGRVTITADKSTSTAYMELSSLRSEDTAVYYCARAPLRFLEWSTQDHYYYYYMDVWGKGTTVTVSS

SEQ ID NO: 175 - protein, 229 aa, Artificial Sequence
  Description of Artificial Sequence: Synthetic polypeptide
DILLTQSPVILSVSPGERVSFSCRASQSIGTNIHWYQQRTNGSPRLLIKYASESISGIPSRFSGSGSGTDFTLSINSVESEDIADYYCQQNNNWPTTFGAGTKLELKRTVAAPSVFIFPPSSELTQDPAVSVALGQTVRITCQGDSLRSYYATWYQQKPGQAPILVIYGENKRPSGIPDRFSGSSSGNTASLTITGAQAEDEADYYCKSRDGSGQHLVFGGGTKLTVLG

SEQ ID NO: 176 - protein, 262 aa, Artificial Sequence; identical to SEQ ID NO: 172
  Description of Artificial Sequence: Synthetic polypeptide

SEQ ID NO: 177 - protein, 223 aa, Artificial Sequence; identical to SEQ ID NO: 169
  Description of Artificial Sequence: Synthetic polypeptide

SEQ ID NO: 178 - protein, 262 aa, Artificial Sequence; identical to SEQ ID NO: 174
  Description of Artificial Sequence: Synthetic polypeptide

SEQ ID NO: 179 - protein, 222 aa, Artificial Sequence; identical to SEQ ID NO: 171
  Description of Artificial Sequence: Synthetic polypeptide

SEQ ID NO: 180 - protein, 255 aa, Artificial Sequence; identical to SEQ ID NO: 168
  Description of Artificial Sequence: Synthetic polypeptide

SEQ ID NO: 181 - protein, 230 aa, Artificial Sequence; identical to SEQ ID NO: 173
  Description of Artificial Sequence: Synthetic polypeptide

SEQ ID NO: 182 - protein, 255 aa, Artificial Sequence; identical to SEQ ID NO: 170
  Description of Artificial Sequence: Synthetic polypeptide

SEQ ID NO: 183 - protein, 229 aa, Artificial Sequence; identical to SEQ ID NO: 175
  Description of Artificial Sequence: Synthetic polypeptide

SEQ ID NO: 184 - protein, 243 aa, Artificial Sequence
  Description of Artificial Sequence: Synthetic polypeptide
EVQLVQSGGGLVKPGGSLRLSCAASGFTFSSFAMHWVRQAPGKGLEWISVIDTRGATYYADSVKGRFTISRDNAKNSLYLQMNSLRAEDTAVYYCARLGNFYYGMDVWGQGTTVTVSSASTKGPQVQLKQSGPGLVQPSQSLSITCTVSGFSLTNYGVHWVRQSPGKGLEWLGVIWSGGNTDYNTPFTSRLSINKDNSKSQVFFKMNSLQSNDTAIYYCARALTYYDYEFAYWGQGTLVTVSA

SEQ ID NO: 185 - protein, 221 aa, Artificial Sequence
  Description of Artificial Sequence: Synthetic polypeptide
EIVLTQSPGTLSVSPGERATLSCRASQSIGSSLHWYQQKPGQAPRLLIKYASQSLSGIPDRFSGSGSGTDFTLTISRLEPEDFAVYYCHQSSRLPHTFGQGTKVEIKRTVAAPDILLTQSPVILSVSPGERVSFSCRASQSIGTNIHWYQQRTNGSPRLLIKYASESISGIPSRFSGSGSGTDFTLSINSVESEDIADYYCQQNNNWPTTFGAGTKLELKR

SEQ ID NO: 186 - protein, 243 aa, Artificial Sequence
  Description of Artificial Sequence: Synthetic polypeptide
QVQLKQSGPGLVQPSQSLSITCTVSGFSLTNYGVHWVRQSPGKGLEWLGVIWSGGNTDYNTPFTSRLSINKDNSKSQVFFKMNSLQSNDTAIYYCARALTYYDYEFAYWGQGTLVTVSAASTKGPEVQLVQSGGGLVKPGGSLRLSCAASGFTFSSFAMHWVRQAPGKGLEWISVIDTRGATYYADSVKGRFTISRDNAKNSLYLQMNSLRAEDTAVYYCARLGNFYYGMDVWGQGTTVTVSS

SEQ ID NO: 187 - protein, 221 aa, Artificial Sequence
  Description of Artificial Sequence: Synthetic polypeptide
DILLTQSPVILSVSPGERVSFSCRASQSIGTNIHWYQQRTNGSPRLLIKYASESISGIPSRFSGSGSGTDFTLSINSVESEDIADYYCQQNNNWPTTFGAGTKLELKRTVAAPEIVLTQSPGTLSVSPGERATLSCRASQSIGSSLHWYQQKPGQAPRLLIKYASQSLSGIPDRFSGSGSGTDFTLTISRLEPEDFAVYYCHQSSRLPHTFGQGTKVEIKR

SEQ ID NO: 188 - protein, 250 aa, Artificial Sequence
  Description of Artificial Sequence: Synthetic polypeptide
EVQLVQSGGGLVKPGGSLRLSCAASGFTFSSFAMHWVRQAPGKGLEWISVIDTRGATYYADSVKGRFTISRDNAKNSLYLQMNSLRAEDTAVYYCARLGNFYYGMDVWGQGTTVTVSSASTKGPSVFPLAPQVQLKQSGPGLVQPSQSLSITCTVSGFSLTNYGVHWVRQSPGKGLEWLGVIWSGGNTDYNTPFTSRLSINKDNSKSQVFFKMNSLQSNDTAIYYCARALTYYDYEFAYWGQGTLVTVSA

SEQ ID NO: 189 - protein, 228 aa, Artificial Sequence
  Description of Artificial Sequence: Synthetic polypeptide
EIVLTQSPGTLSVSPGERATLSCRASQSIGSSLHWYQQKPGQAPRLLIKYASQSLSGIPDRFSGSGSGTDFTLTISRLEPEDFAVYYCHQSSRLPHTFGQGTKVEIKRTVAAPSVFIFPPDILLTQSPVILSVSPGERVSFSCRASQSIGTNIHWYQQRTNGSPRLLIKYASESISGIPSRFSGSGSGTDFTLSINSVESEDIADYYCQQNNNWPTTFGAGTKLELKR

SEQ ID NO: 190 - protein, 250 aa, Artificial Sequence
  Description of Artificial Sequence: Synthetic polypeptide
QVQLKQSGPGLVQPSQSLSITCTVSGFSLTNYGVHWVRQSPGKGLEWLGVIWSGGNTDYNTPFTSRLSINKDNSKSQVFFKMNSLQSNDTAIYYCARALTYYDYEFAYWGQGTLVTVSAASTKGPSVFPLAPEVQLVQSGGGLVKPGGSLRLSCAASGFTFSSFAMHWVRQAPGKGLEWISVIDTRGATYYADSVKGRFTISRDNAKNSLYLQMNSLRAEDTAVYYCARLGNFYYGMDVWGQGTTVTVSS

SEQ ID NO: 191 - protein, 228 aa, Artificial Sequence
  Description of Artificial Sequence: Synthetic polypeptide
DILLTQSPVILSVSPGERVSFSCRASQSIGTNIHWYQQRTNGSPRLLIKYASESISGIPSRFSGSGSGTDFTLSINSVESEDIADYYCQQNNNWPTTFGAGTKLELKRTVAAPSVFIFPPEIVLTQSPGTLSVSPGERATLSCRASQSIGSSLHWYQQKPGQAPRLLIKYASQSLSGIPDRFSGSGSGTDFTLTISRLEPEDFAVYYCHQSSRLPHTFGQGTKVEIKR

SEQ ID NO: 192 - protein, 250 aa, Artificial Sequence; identical to SEQ ID NO: 188
  Description of Artificial Sequence: Synthetic polypeptide

SEQ ID NO: 193 - protein, 221 aa, Artificial Sequence; identical to SEQ ID NO: 185
  Description of Artificial Sequence: Synthetic polypeptide

SEQ ID NO: 194 - protein, 250 aa, Artificial Sequence; identical to SEQ ID NO: 190
  Description of Artificial Sequence: Synthetic polypeptide

SEQ ID NO: 195 - protein, 221 aa, Artificial Sequence; identical to SEQ ID NO: 187
  Description of Artificial Sequence: Synthetic polypeptide

SEQ ID NO: 196 - protein, 243 aa, Artificial Sequence; identical to SEQ ID NO: 184
  Description of Artificial Sequence: Synthetic polypeptide

SEQ ID NO: 197 - protein, 228 aa, Artificial Sequence; identical to SEQ ID NO: 189
  Description of Artificial Sequence: Synthetic polypeptide

SEQ ID NO: 198 - protein, 243 aa, Artificial Sequence; identical to SEQ ID NO: 186
  Description of Artificial Sequence: Synthetic polypeptide

SEQ ID NO: 199 - protein, 228 aa, Artificial Sequence; identical to SEQ ID NO: 191
  Description of Artificial Sequence: Synthetic polypeptide

SEQ ID NO: 200 - protein, 249 aa, Artificial Sequence
  Description of Artificial Sequence: Synthetic polypeptide
QVQLKQSGPGLVQPSQSLSITCTVSGFSLTNYGVHWVRQSPGKGLEWLGVIWSGGNTDYNTPFTSRLSINKDNSKSQVFFKMNSLQSNDTAIYYCARALTYYDYEFAYWGQGTLVTVSAASTKGPEVQLVQSGGGLVKPGGSLRLSCAASGFTFSSYAMHWVRQAPGKGLEWVAVISYDGSNKYYADSVKGRFTISRDNSKNTLYLQMNSLRAEDTAVYYCARFSGWPNNYYYYGMDVWGQGTTVTVSS

SEQ ID NO: 201 - protein, 227 aa, Artificial Sequence
  Description of Artificial Sequence: Synthetic polypeptide
DILLTQSPVILSVSPGERVSFSCRASQSIGTNIHWYQQRTNGSPRLLIKYASESISGIPSRFSGSGSGTDFTLSINSVESEDIADYYCQQNNNWPTTFGAGTKLELKRTVAAPDVVMTQSPLSLPVTPGEPASISCRSSQSLLHSNGFNYVDWYLQKPGQSPHLLIYFGSYRASGVPDRFSGSGSGTDFTLKISRVEAEDVGVYYCMQALQTPPWTFGQGTKVEIRR

SEQ ID NO: 202 - protein, 249 aa, Artificial Sequence
  Description of Artificial Sequence: Synthetic polypeptide
EVQLVQSGGGLVKPGGSLRLSCAASGFTFSSYAMHWVRQAPGKGLEWVAVISYDGSNKYYADSVKGRFTISRDNSKNTLYLQMNSLRAEDTAVYYCARFSGWPNNYYYYGMDVWGQGTTVTVSSASTKGPQVQLKQSGPGLVQPSQSLSITCTVSGFSLTNYGVHWVRQSPGKGLEWLGVIWSGGNTDYNTPFTSRLSINKDNSKSQVFFKMNSLQSNDTAIYYCARALTYYDYEFAYWGQGTLVTVSA

SEQ ID NO: 203 - protein, 227 aa, Artificial Sequence
  Description of Artificial Sequence: Synthetic polypeptide
DVVMTQSPLSLPVTPGEPASISCRSSQSLLHSNGFNYVDWYLQKPGQSPHLLIYFGSYRASGVPDRFSGSGSGTDFTLKISRVEAEDVGVYYCMQALQTPPWTFGQGTKVEIRRTVAAPDILLTQSPVILSVSPGERVSFSCRASQSIGTNIHWYQQRTNGSPRLLIKYASESISGIPSRFSGSGSGTDFTLSINSVESEDIADYYCQQNNNWPTTFGAGTKLELKR

SEQ ID NO: 204 - protein, 256 aa, Artificial Sequence
  Description of Artificial Sequence: Synthetic polypeptide
EVQLVQSGGGLVKPGGSLRLSCAASGFTFSSYAMHWVRQAPGKGLEWVAVISYDGSNKYYADSVKGRFTISRDNSKNTLYLQMNSLRAEDTAVYYCARFSGWPNNYYYYGMDVWGQGTTVTVSSASTKGPSVFPLAPQVQLKQSGPGLVQPSQSLSITCTVSGFSLTNYGVHWVRQSPGKGLEWLGVIWSGGNTDYNTPFTSRLSINKDNSKSQVFFKMNSLQSNDTAIYYCARALTYYDYEFAYWGQGTLVTVSA

SEQ ID NO: 205 - protein, 234 aa, Artificial Sequence
  Description of Artificial Sequence: Synthetic polypeptide
DVVMTQSPLSLPVTPGEPASISCRSSQSLLHSNGFNYVDWYLQKPGQSPHLLIYFGSYRASGVPDRFSGSGSGTDFTLKISRVEAEDVGVYYCMQALQTPPWTFGQGTKVEIRRTVAAPSVFIFPPDILLTQSPVILSVSPGERVSFSCRASQSIGTNIHWYQQRTNGSPRLLIKYASESISGIPSRFSGSGSGTDFTLSINSVESEDIADYYCQQNNNWPTTFGAGTKLELKR

SEQ ID NO: 206 - protein, 256 aa, Artificial Sequence
  Description of Artificial Sequence: Synthetic polypeptide
QVQLKQSGPGLVQPSQSLSITCTVSGFSLTNYGVHWVRQSPGKGLEWLGVIWSGGNTDYNTPFTSRLSINKDNSKSQVFFKMNSLQSNDTAIYYCARALTYYDYEFAYWGQGTLVTVSAASTKGPSVFPLAPEVQLVQSGGGLVKPGGSLRLSCAASGFTFSSYAMHWVRQAPGKGLEWVAVISYDGSNKYYADSVKGRFTISRDNSKNTLYLQMNSLRAEDTAVYYCARFSGWPNNYYYYGMDVWGQGTTVTVSS

SEQ ID NO: 207 - protein, 234 aa, Artificial Sequence
  Description of Artificial Sequence: Synthetic polypeptide
DILLTQSPVILSVSPGERVSFSCRASQSIGTNIHWYQQRTNGSPRLLIKYASESISGIPSRFSGSGSGTDFTLSINSVESEDIADYYCQQNNNWPTTFGAGTKLELKRTVAAPSVFIFPPDVVMTQSPLSLPVTPGEPASISCRSSQSLLHSNGFNYVDWYLQKPGQSPHLLIYFGSYRASGVPDRFSGSGSGTDFTLKISRVEAEDVGVYYCMQALQTPPWTFGQGTKVEIRR

SEQ ID NO: 208 - protein, 256 aa, Artificial Sequence; identical to SEQ ID NO: 204
  Description of Artificial Sequence: Synthetic polypeptide

SEQ ID NO: 209 - protein, 227 aa, Artificial Sequence; identical to SEQ ID NO: 203
  Description of Artificial Sequence: Synthetic polypeptide

SEQ ID NO: 210 - protein, 256 aa, Artificial Sequence; identical to SEQ ID NO: 206
  Description of Artificial Sequence: Synthetic polypeptide

SEQ ID NO: 211 - protein, 227 aa, Artificial Sequence; identical to SEQ ID NO: 201
  Description of Artificial Sequence: Synthetic polypeptide

SEQ ID NO: 212 - protein, 249 aa, Artificial Sequence; identical to SEQ ID NO: 202
  Description of Artificial Sequence: Synthetic polypeptide

SEQ ID NO: 213 - protein, 234 aa, Artificial Sequence; identical to SEQ ID NO: 205
  Description of Artificial Sequence: Synthetic polypeptide

SEQ ID NO: 214 - protein, 249 aa, Artificial Sequence; identical to SEQ ID NO: 200
  Description of Artificial Sequence: Synthetic polypeptide

SEQ ID NO: 215 - protein, 234 aa, Artificial Sequence; identical to SEQ ID NO: 207
  Description of Artificial Sequence: Synthetic polypeptide

SEQ ID NO: 216 - protein, 247 aa, Artificial Sequence
  Description of Artificial Sequence: Synthetic polypeptide
QVQLKQSGPGLVQPSQSLSITCTVSGFSLTNYGVHWVRQSPGKGLEWLGVIWSGGNTDYNTPFTSRLSINKDNSKSQVFFKMNSLQSNDTAIYYCARALTYYDYEFAYWGQGTLVTVSAASTKGPQVQLVESGGGLVKPGGSLRLSCAASGFTFSDYYMSWIRQAPGKGLEWVSYISSSGSTIYYADSVKGRFTISRDNAKNSLYLQMNSLRAEDTAVYYCARDEYNSGWYVLFDYWGQGTLVTVSS

SEQ ID NO: 217 - protein, 221 aa, Artificial Sequence
  Description of Artificial Sequence: Synthetic polypeptide
DILLTQSPVILSVSPGERVSFSCRASQSIGTNIHWYQQRTNGSPRLLIKYASESISGIPSRFSGSGSGTDFTLSINSVESEDIADYYCQQNNNWPTTFGAGTKLELKRTVAAPDIQMTQSPSSVSASVGDRVTITCRASQGISSWLAWYQQKPGKAPNLLIYEASSLQSGVPSRFGGSGSGTDFTLTISSLQPEDFATYYCQQANGFPWTFGQGTKVEIKR

SEQ ID NO: 218 - protein, 247 aa, Artificial Sequence
  Description of Artificial Sequence: Synthetic polypeptide
QVQLVESGGGLVKPGGSLRLSCAASGFTFSDYYMSWIRQAPGKGLEWVSYISSSGSTIYYADSVKGRFTISRDNAKNSLYLQMNSLRAEDTAVYYCARDEYNSGWYVLFDYWGQGTLVTVSSASTKGPQVQLKQSGPGLVQPSQSLSITCTVSGFSLTNYGVHWVRQSPGKGLEWLGVIWSGGNTDYNTPFTSRLSINKDNSKSQVFFKMNSLQSNDTAIYYCARALTYYDYEFAYWGQGTLVTVSA

SEQ ID NO: 219 - protein, 221 aa, Artificial Sequence
  Description of Artificial Sequence: Synthetic polypeptide
DIQMTQSPSSVSASVGDRVTITCRASQGISSWLAWYQQKPGKAPNLLIYEASSLQSGVPSRFGGSGSGTDFTLTISSLQPEDFATYYCQQANGFPWTFGQGTKVEIKRTVAAPDILLTQSPVILSVSPGERVSFSCRASQSIGTNIHWYQQRTNGSPRLLIKYASESISGIPSRFSGSGSGTDFTLSINSVESEDIADYYCQQNNNWPTTFGAGTKLELKR

SEQ ID NO: 220 - protein, 246 aa, Artificial Sequence
  Description of Artificial Sequence: Synthetic polypeptide
QVQLKQSGPGLVQPSQSLSITCTVSGFSLTNYGVHWVRQSPGKGLEWLGVIWSGGNTDYNTPFTSRLSINKDNSKSQVFFKMNSLQSNDTAIYYCARALTYYDYEFAYWGQGTLVTVSAASTKGPQVQLQQSGPELVRPGASVKWSCPASGYTFTSYWLHWVKKQRPGQGLEWIGMIDPSNSDTRFNPPNFKDKATLNVDRSSNTAYNLLSSLTSADSAVYYCATYGSYVSPLDYWGQGTSVYVSS

SEQ ID NO: 221 - protein, 227 aa, Artificial Sequence
  Description of Artificial Sequence: Synthetic polypeptide
DILLTQSPVILSVSPGERVSFSCRASQSIGTNIHWYQQRTNGSPRLLIKYASESISGIPSRFSGSGSGTDFTLSINSVESEDIADYYCQQNNNWPTTFGAGTKLELKRTVAAPDIMMSQSPSSLTVSVGEKVTVSCKSSQSLLVTSSQKNYLAWYQQKPQQSPKLLIYWASTRESGVPDRFTGSGSGTDFTLTITSVKADDLAVYYCQQYYAYPWTFGDGTKLEIKR

SEQ ID NO: 222 - protein, 246 aa, Artificial Sequence
  Description of Artificial Sequence: Synthetic polypeptide
QVQLQQSGPELVRPGASVKWSCPASGYTFTSYWLHWVKKQRPGQGLEWIGMIDPSNSDTRFNPPNFKDKATLNVDRSSNTAYNLLSSLTSADSAVYYCATYGSYVSPLDYWGQGTSVYVSSASTKGPQVQLKQSGPGLVQPSQSLSITCTVSGFSLTNYGVHWVRQSPGKGLEWLGVIWSGGNTDYNTPFTSRLSINKDNSKSQVFFKMNSLQSNDTAIYYCARALTYYDYEFAYWGQGTLVTVSA

SEQ ID NO: 223 - protein, 227 aa, Artificial Sequence
  Description of Artificial Sequence: Synthetic polypeptide
DIMMSQSPSSLTVSVGEKVTVSCKSSQSLLVTSSQKNYLAWYQQKPQQSPKLLIYWASTRESGVPDRFTGSGSGTDFTLTITSVKADDLAVYYCQQYYAYPWTFGDGTKLEIKRTVAAPDILLTQSPVILSVSPGERVSFSCRASQSIGTNIHWYQQRTNGSPRLLIKYASESISGIPSRFSGSGSGTDFTLSINSVESEDIADYYCQQNNNWPTTFGAGTKLELKR

SEQ ID NO: 224 - protein, 246 aa, Artificial Sequence
  Description of Artificial Sequence: Synthetic polypeptide
EVQLVESGGGLVQPGGSLRLSCAASGFNIKDTYIHWVRQAPGKGLEWVARIYPTNGYTRYADSVKGRFTISADTSKNTAYLQMNSLRAEDTAVYYCSRWGGDGFYAMDYWGQGTLVTVSSASTKGPQVQLVQSGAEVKKPGASVKVSCKASGYTFTSYDINWVRQATGQGLEWMGWMNPNSGNTGYAQKFQGRVTMTRNTSISTAYMELSSLRSEDTAVYYCARDPYYYYYGMDVWGQGTTVTVSS

SEQ ID NO: 225 - protein, 225 aa, Artificial Sequence
  Description of Artificial Sequence: Synthetic polypeptide
DIQMTQSPSSLSASVGDRVTITCRASQDVNTAVAWYQQKPGKAPKLLIYSASFLYSGVPSRFSGSRSGTDFTLTISSLQPEDFATYYCQQHYTTPPTFGQGTKVEIKRTVAAPQSVLTQPPSVSAAPGQKVTISCSGSSSNIENNHVSWYQQLPGTAPKLLIYDNNKRPSGIPDRFSGSKSGTSATLGITGLQTGDEADYYCETWDTSLSAGRVFGGGTKLTVLG

SEQ ID NO: 226 - protein, 246 aa, Artificial Sequence
  Description of Artificial Sequence: Synthetic polypeptide
QVQLVQSGAEVKKPGASVKVSCKASGYTFTSYDINWVRQATGQGLEWMGWMNPNSGNTGYAQKFQGRVTMTRNTSISTAYMELSSLRSEDTAVYYCARDPYYYYYGMDVWGQGTTVTVSSASTKGPEVQLVESGGGLVQPGGSLRLSCAASGFNIKDTYIHWVRQAPGKGLEWVARIYPTNGYTRYADSVKGRFTISADTSKNTAYLQMNSLRAEDTAVYYCSRWGGDGFYAMDYWGQGTLVTVSS

SEQ ID NO: 227 - protein, 226 aa, Artificial Sequence
  Description of Artificial Sequence: Synthetic polypeptide
QSVLTQPPSVSAAPGQKVTISCSGSSSNIENNHVSWYQQLPGTAPKLLIYDNNKRPSGIPDRFSGSKSGTSATLGITGLQTGDEADYYCETWDTSLSAGRVFGGGTKLTVLGQPKAAPDIQMTQSPSSLSASVGDRVTITCRASQDVNTAVAWYQQKPGKAPKLLIYSASFLYSGVPSRFSGSRSGTDFTLTISSLQPEDFATYYCQQHYTTPPTFGQGTKVEIKR

SEQ ID NO: 228 - protein, 251 aa, Artificial Sequence
  Description of Artificial Sequence: Synthetic polypeptide
EVQLVESGGGLVQPGGSLRLSCAASGFNIKDTYIHWVRQAPGKGLEWVARIYPTNGYTRYADSVKGRFTISADTSKNTAYLQMNSLRAEDTAVYYCSRWGGDGFYAMDYWGQGTLVTVSSASTKGPEVQLLESGGGLVQPGGSLRLSCTASGFTFSSYAMNWVRQAPGKGLEWVSAISGSGGTTFYADSVKGRFTISRDNSRTTLYLQMNSLRAEDTAVYYCAKDLGWSDSYYYYYGMDVWGQGTTVTVSS

SEQ ID NO: 229 - protein, 221 aa, Artificial Sequence
  Description of Artificial Sequence: Synthetic polypeptide
DIQMTQSPSSLSASVGDRVTITCRASQDVNTAVAWYQQKPGKAPKLLIYSASFLYSGVPSRFSGSRSGTDFTLTISSLQPEDFATYYCQQHYTTPPTFGQGTKVEIKRTVAAPDIQMTQFPSSLSASVGDRVTITCRASQGIRNDLGWYQQKPGKAPKRLIYAASRLHRGVPSRFSGSGSGTEFTLTISSLQPEDFATYYCLQHNSYPCSFGQGTKLEIKR

SEQ ID NO: 230 - protein, 251 aa, Artificial Sequence
  Description of Artificial Sequence: Synthetic polypeptide
EVQLLESGGGLVQPGGSLRLSCTASGFTFSSYAMNWVRQAPGKGLEWVSAISGSGGTTFYADSVKGRFTISRDNSRTTLYLQMNSLRAEDTAVYYCAKDLGWSDSYYYYYGMDVWGQGTTVTVSSASTKGPEVQLVESGGGLVQPGGSLRLSCAASGFNIKDTYIHWVRQAPGKGLEWVARIYPTNGYTRYADSVKGRFTISADTSKNTAYLQMNSLRAEDTAVYYCSRWGGDGFYAMDYWGQGTLVTVSS

SEQ ID NO: 231 - protein, 221 aa, Artificial Sequence
  Description of Artificial Sequence: Synthetic polypeptide
DIQMTQFPSSLSASVGDRVTITCRASQGIRNDLGWYQQKPGKAPKRLIYAASRLHRGVPSRFSGSGSGTEFTLTISSLQPEDFATYYCLQHNSYPCSFGQGTKLEIKRTVAAPDIQMTQSPSSLSASVGDRVTITCRASQDVNTAVAWYQQKPGKAPKLLIYSASFLYSGVPSRFSGSRSGTDFTLTISSLQPEDFATYYCQQHYTTPPTFGQGTKVEIKR

SEQ ID NO: 232 - protein, 252 aa, Artificial Sequence
  Description of Artificial Sequence: Synthetic polypeptide
EVQLVQSGGGLVKPGGSLRLSCAASGFTFSSYAMHWVRQAPGKGLEWVAVISYDGSNKYYADSVKGRFTISRDNSKNTLYLQMNSLRAEDTAVYYCARFSGWPNNYYYYGMDVWGQGTTVTVSSASTKGPQVQLVESGGGLVKPGGSLRLSCAASGFTFSDYYMSWIRQAPGKGLEWVSYISSSGSTIYYADSVKGRFTISRDNAKNSLYLQMNSLRAEDTAVYYCARDEYNSGWYVLFDYWGQGTLVTVSS

SEQ ID NO: 233 - protein, 227 aa, Artificial Sequence
  Description of Artificial Sequence: Synthetic polypeptide
DVVMTQSPLSLPVTPGEPASISCRSSQSLLHSNGFNYVDWYLQKPGQSPHLLIYFGSYRASGVPDRFSGSGSGTDFTLKISRVEAEDVGVYYCMQALQTPPWTFGQGTKVEIRRTVAAPDIQMTQSPSSVSASVGDRVTITCRASQGISSWLAWYQQKPGKAPNLLIYEASSLQSGVPSRFGGSGSGTDFTLTISSLQPEDFATYYCQQANGFPWTFGQGTKVEIKR

SEQ ID NO: 234 - protein, 252 aa, Artificial Sequence
  Description of Artificial Sequence: Synthetic polypeptide
QVQLVESGGGLVKPGGSLRLSCAASGFTFSDYYMSWIRQAPGKGLEWVSYISSSGSTIYYADSVKGRFTISRDNAKNSLYLQMNSLRAEDTAVYYCARDEYNSGWYVLFDYWGQGTLVTVSSASTKGPEVQLVQSGGGLVKPGGSLRLSCAASGFTFSSYAMHWVRQAPGKGLEWVAVISYDGSNKYYADSVKGRFTISRDNSKNTLYLQMNSLRAEDTAVYYCARFSGWPNNYYYYGMDVWGQGTTVTVSS

SEQ ID NO: 235 - protein, 227 aa, Artificial Sequence
  Description of Artificial Sequence: Synthetic polypeptide
DIQMTQSPSSVSASVGDRVTITCRASQGISSWLAWYQQKPGKAPNLLIYEASSLQSGVPSRFGGSGSGTDFTLTISSLQPEDFATYYCQQANGFPWTFGQGTKVEIKRTVAAPDVVMTQSPLSLPVTPGEPASISCRSSQSLLHSNGFNYVDWYLQKPGQSPHLLIYFGSYRASGVPDRFSGSGSGTDFTLKISRVEAEDVGVYYCMQALQTPPWTFGQGTKVEIRR

SEQ ID NO: 236 - protein, 248 aa, Artificial Sequence
  Description of Artificial Sequence: Synthetic polypeptide
EVQLVESGGGLVQPGGSLRLSCAASGYTFTNYGMNWVRQAPGKGLEWVGWINTYTGEPTYAADFKRRFTFSLDTSKSTAYLQMNSLRAEDTAVYYCAKYPHYYGSSHWYFDVWGQGTLVTVSSASTKGPQVQLKQSGPGLVQPSQSLSITCTVSGFSLTNYGVHWVRQSPGKGLEWLGVIWSGGNTDYNTPFTSRLSINKDNSKSQVFFKMNSLQSNDTAIYYCARALTYYDYEFAYWGQGTLVTVSA

SEQ ID NO: 237 - protein, 221 aa, Artificial Sequence
  Description of Artificial Sequence: Synthetic polypeptide
DIQMTQSPSSLSASVGDRVTITCSASQDISNYLNWYQQKPGKAPKVLIYFTSSLHSGVPSRFSGSGSGTDFTLTISSLQPEDFATYYCQQYSTVPWTFGQGTKVEIKRTVAAPDILLTQSPVILSVSPGERVSFSCRASQSIGTNIHWYQQRTNGSPRLLIKYASESISGIPSRFSGSGSGTDFTLSINSVESEDIADYYCQQNNNWPTTFGAGTKLELKR

SEQ ID NO: 238 - protein, 248 aa, Artificial Sequence
  Description of Artificial Sequence: Synthetic polypeptide
QVQLKQSGPGLVQPSQSLSITCTVSGFSLTNYGVHWVRQSPGKGLEWLGVIWSGGNTDYNTPFTSRLSINKDNSKSQVFFKMNSLQSNDTAIYYCARALTYYDYEFAYWGQGTLVTVSAASTKGPEVQLVESGGGLVQPGGSLRLSCAASGYTFTNYGMNWVRQAPGKGLEWVGWINTYTGEPTYAADFKRRFTFSLDTSKSTAYLQMNSLRAEDTAVYYCAKYPHYYGSSHWYFDVWGQGTLVTVSS

SEQ ID NO: 239 - protein, 221 aa, Artificial Sequence
  Description of Artificial Sequence: Synthetic polypeptide
DILLTQSPVILSVSPGERVSFSCRASQSIGTNIHWYQQRTNGSPRLLIKYASESISGIPSRFSGSGSGTDFTLSINSVESEDIADYYCQQNNNWPTTFGAGTKLELKRTVAAPDIQMTQSPSSLSASVGDRVTITCSASQDISNYLNWYQQKPGKAPKVLIYFTSSLHSGVPSRFSGSGSGTDFTLTISSLQPEDFATYYCQQYSTVPWTFGQGTKVEIKR

SEQ ID NO: 240 - protein, 249 aa, Artificial Sequence
  Description of Artificial Sequence: Synthetic polypeptide
EVQLVESGGGLVQPGGSLRLSCAASGYTFTNYGMNWVRQAPGKGLEWVGWINTYTGEPTYAADFKRRFTFSLDTSKSTAYLQMNSLRAEDTAVYYCAKYPHYYGSSHWYFDVWGQGTLVTVSSASTKGPEVQLVESGGGLVQPGGSLRLSCAASGFNIKDTYIHWVRQAPGKGLEWVARIYPTNGYTRYADSVKGRFTISADTSKNTAYLQMNSLRAEDTAVYYCSRWGGDGFYAMDYWGQGTLVTVSS

SEQ ID NO: 241 - protein, 221 aa, Artificial Sequence
  Description of Artificial Sequence: Synthetic polypeptide
DIQMTQSPSSLSASVGDRVTITCSASQDISNYLNWYQQKPGKAPKVLIYFTSSLHSGVPSRFSGSGSGTDFTLTISSLQPEDFATYYCQQYSTVPWTFGQGTKVEIKRTVAAPDIQMTQSPSSLSASVGDRVTITCRASQDVNTAVAWYQQKPGKAPKLLIYSASFLYSGVPSRFSGSRSGTDFTLTISSLQPEDFATYYCQQHYTTPPTFGQGTKVEIKR

SEQ ID NO: 242 - protein, 249 aa, Artificial Sequence
  Description of Artificial Sequence: Synthetic polypeptide
EVQLVESGGGLVQPGGSLRLSCAASGFNIKDTYIHWVRQAPGKGLEWVARIYPTNGYTRYADSVKGRFTISADTSKNTAYLQMNSLRAEDTAVYYCSRWGGDGFYAMDYWGQGTLVTVSSASTKGPEVQLVESGGGLVQPGGSLRLSCAASGYTFTNYGMNWVRQAPGKGLEWVGWINTYTGEPTYAADFKRRFTFSLDTSKSTAYLQMNSLRAEDTAVYYCAKYPHYYGSSHWYFDVWGQGTLVTVSS

SEQ ID NO: 243 - protein, 221 aa, Artificial Sequence
  Description of Artificial Sequence: Synthetic polypeptide
DIQMTQSPSSLSASVGDRVTITCRASQDVNTAVAWYQQKPGKAPKLLIYSASFLYSGVPSRFSGSRSGTDFTLTISSLQPEDFATYYCQQHYTTPPTFGQGTKVEIKRTVAAPDIQMTQSPSSLSASVGDRVTITCSASQDISNYLNWYQQKPGKAPKVLIYFTSSLHSGVPSRFSGSGSGTDFTLTISSLQPEDFATYYCQQYSTVPWTFGQGTKVEIKR

SEQ ID NO: 244 - protein, 250 aa, Artificial Sequence
  Description of Artificial Sequence: Synthetic polypeptide
EVQLVESGGGLVQPGGSLRLSCAASGYTFTNYGMNWVRQAPGKGLEWVGWINTYTGEPTYAADFKRRFTFSLDTSKSTAYLQMNSLRAEDTAVYYCAKYPHYYGSSHWYFDVWGQGTLVTVSSASTKGPQVQLQQPGAELVKPGASVKMSCKASGYTFTSYNMHWVKQTPGRGLEWIGAIYPGNGDTSYNQKFKGKATLTADKSSSTAYMQLSSLTSEDSAVYYCARSTYYGGDWYFNVWGAGTTVTVSA

SEQ ID NO: 245 - protein, 220 aa, Artificial Sequence
  Description of Artificial Sequence: Synthetic polypeptide
DIQMTQSPSSLSASVGDRVTITCSASQDISNYLNWYQQKPGKAPKVLIYFTSSLHSGVPSRFSGSGSGTDFTLTISSLQPEDFATYYCQQYSTVPWTFGQGTKVEIKRTVAAPQIVLSQSPAILSPSPGEKVTMTCRASSSVSYIHWFQQKPGSSPKPWIYATSNLASGVPVRFSGSGSGTSYSLTISRVEAEDAATYYCQQWTSNPPTFGGGTKLEIKR

SEQ ID NO: 246 - protein, 250 aa, Artificial Sequence
  Description of Artificial Sequence: Synthetic polypeptide
QVQLQQPGAELVKPGASVKMSCKASGYTFTSYNMHWVKQTPGRGLEWIGAIYPGNGDTSYNQKFKGKATLTADKSSSTAYMQLSSLTSEDSAVYYCARSTYYGGDWYFNVWGAGTTVTVSAASTKGPEVQLVESGGGLVQPGGSLRLSCAASGYTFTNYGMNWVRQAPGKGLEWVGWINTYTGEPTYAADFKRRFTFSLDTSKSTAYLQMNSLRAEDTAVYYCAKYPHYYGSSHWYFDVWGQGTLVTVSS

SEQ ID NO: 247 - protein, 220 aa, Artificial Sequence
  Description of Artificial Sequence: Synthetic polypeptide
QIVLSQSPAILSPSPGEKVTMTCRASSSVSYIHWFQQKPGSSPKPWIYATSNLASGVPVRFSGSGSGTSYSLTISRVEAEDAATYYCQQWTSNPPTFGGGTKLEIKRTVAAPDIQMTQSPSSLSASVGDRVTITCSASQDISNYLNWYQQKPGKAPKVLIYFTSSLHSGVPSRFSGSGSGTDFTLTISSLQPEDFATYYCQQYSTVPWTFGQGTKVEIKR

SEQ ID NO: 248 - protein, 249 aa, Artificial Sequence
  Description of Artificial Sequence: Synthetic polypeptide
EVQLVESGGGLVQPGGSLRLSCAASGYTFTNYGMNWVRQAPGKGLEWVGWINTYTGEPTYAADFKRRFTFSLDTSKSTAYLQMNSLRAEDTAVYYCAKYPHYYGSSHWYFDVWGQGTLVTVSSASTKGPQVQLVQSGAEVKKPGASVKVSCKASGYTFTSYDINWVRQATGQGLEWMGWMNPNSGNTGYAQKFQGRVTMTRNTSISTAYMELSSLRSEDTAVYYCARDPYYYYYGMDVWGQGTTVTVSS

SEQ ID NO: 249 - protein, 225 aa, Artificial Sequence
  Description of Artificial Sequence: Synthetic polypeptide
DIQMTQSPSSLSASVGDRVTITCSASQDISNYLNWYQQKPGKAPKVLIYFTSSLHSGVPSRFSGSGSGTDFTLTISSLQPEDFATYYCQQYSTVPWTFGQGTKVEIKRTVAAPQSVLTQPPSVSAAPGQKVTISCSGSSSNIENNHVSWYQQLPGTAPKLLIYDNNKRPSGIPDRFSGSKSGTSATLGITGLQTGDEADYYCETWDTSLSAGRVFGGGTKLTVLG

SEQ ID NO: 250 - protein, 249 aa, Artificial Sequence
  Description of Artificial Sequence: Synthetic polypeptide
QVQLVQSGAEVKKPGASVKVSCKASGYTFTSYDINWVRQATGQGLEWMGWMNPNSGNTGYAQKFQGRVTMTRNTSISTAYMELSSLRSEDTAVYYCARDPYYYYYGMDVWGQGTTVTVSSASTKGPEVQLVESGGGLVQPGGSLRLSCAASGYTFTNYGMNWVRQAPGKGLEWVGWINTYTGEPTYAADFKRRFTFSLDTSKSTAYLQMNSLRAEDTAVYYCAKYPHYYGSSHWYFDVWGQGTLVTVSS

SEQ ID NO: 251 - protein, 226 aa, Artificial Sequence
  Description of Artificial Sequence: Synthetic polypeptide
QSVLTQPPSVSAAPGQKVTISCSGSSSNIENNHVSWYQQLPGTAPKLLIYDNNKRPSGIPDRFSGSKSGTSATLGITGLQTGDEADYYCETWDTSLSAGRVFGGGTKLTVLGQPKAAPDIQMTQSPSSLSASVGDRVTITCSASQDISNYLNWYQQKPGKAPKVLIYFTSSLHSGVPSRFSGSGSGTDFTLTISSLQPEDFATYYCQQYSTVPWTFGQGTKVEIKR

SEQ ID NO: 252 - protein, 247 aa, Artificial Sequence
  Description of Artificial Sequence: Synthetic polypeptide
EVQLVESGGGLVQPGGSLRLSCAASGYTFTNYGMNWVRQAPGKGLEWVGWINTYTGEPTYAADFKRRFTFSLDTSKSTAYLQMNSLRAEDTAVYYCAKYPHYYGSSHWYFDVWGQGTLVTVSSASTKGPEVQLVESGGGLVQPGGSLRLSCAASGFTFTDNWISWVRQAPGKGLEWVGYISPNSGFTYYADSVKGRFTISADTSKNTAYLQMNSLRAEDTAVYYCARDNFGGYFDYWGQGTLVTVSS

SEQ ID NO: 253 - protein, 222 aa, Artificial Sequence
  Description of Artificial Sequence: Synthetic polypeptide
DIQMTQSPSSLSASVGDRVTITCSASQDISNYLNWYQQKPGKAPKVLIYFTSSLHSGVPSRFSGSGSGTDFTLTISSLQPEDFATYYCQQYSTVPWTFGQGTKVEIKRTVAAPDIQMTQSPSSLSASVGDRVTITCRASQDVSTAVAWYQQKPGKAPKLLIYSASFLYSGVPSRFSGSGSGTDFTLTISSLQPEDFATTYYCQQSYTGTVTFGQGTKVEIKR

SEQ ID NO: 254 - protein, 247 aa, Artificial Sequence
  Description of Artificial Sequence: Synthetic polypeptide
EVQLVESGGGLVQPGGSLRLSCAASGFTFTDNWISWVRQAPGKGLEWVGYISPNSGFTYYADSVKGRFTISADTSKNTAYLQMNSLRAEDTAVYYCARDNFGGYFDYWGQGTLVTVSSASTKGPEVQLVESGGGLVQPGGSLRLSCAASGYTFTNYGMNWVRQAPGKGLEWVGWINTYTGEPTYAADFKRRFTFSLDTSKSTAYLQMNSLRAEDTAVYYCAKYPHYYGSSHWYFDVWGQGTLVTVSS

SEQ ID NO: 255 - protein, 222 aa, Artificial Sequence
  Description of Artificial Sequence: Synthetic polypeptide
DIQMTQSPSSLSASVGDRVTITCRASQDVSTAVAWYQQKPGKAPKLLIYSASFLYSGVPSRFSGSGSGTDFTLTISSLQPEDFATTYYCQQSYTGTVTFGQGTKVEIKRTVAAPDIQMTQSPSSLSASVGDRVTITCSASQDISNYLNWYQQKPGKAPKVLIYFTSSLHSGVPSRFSGSGSGTDFTLTISSLQPEDFATYYCQQYSTVPWTFGQGTKVEIKR

SEQ ID NO: 256 - protein, 251 aa, Artificial Sequence
  Description of Artificial Sequence: Synthetic polypeptide
EVQLVESGGGLVQPGGSLRLSCAASGYTFTNYGMNWVRQAPGKGLEWVGWINTYTGEPTYAADFKRRFTFSLDTSKSTAYLQMNSLRAEDTAVYYCAKYPHYYGSSHWYFDVWGQGTLVTVSSASTKGPQVQLVESGGGLVKPGGSLRLSCAASGFTFSDYYMSWIRQAPGKGLEWVSYISSSGSTIYYADSVKGRFTISRDNAKNSLYLQMNSLRAEDTAVYYCARDEYNSGWYVLFDYWGQGTLVTVSS

SEQ ID NO: 257 - protein, 221 aa, Artificial Sequence
  Description of Artificial Sequence: Synthetic polypeptide
DIQMTQSPSSLSASVGDRVTITCSASQDISNYLNWYQQKPGKAPKVLIYFTSSLHSGVPSRFSGSGSGTDFTLTISSLQPEDFATYYCQQYSTVPWTFGQGTKVEIKRTVAAPDIQMTQSPSSVSASVGDRVTITCRASQGISSWLAWYQQKPGKAPNLLIYEASSLQSGVPSRFGGSGSGTDFTLTISSLQPEDFATYYCQQANGFPWTFGQGTKVEIKR

SEQ ID NO: 258 - protein, 251 aa, Artificial Sequence
  Description of Artificial Sequence: Synthetic polypeptide
QVQLVESGGGLVKPGGSLRLSCAASGFTFSDYYMSWIRQAPGKGLEWVSYISSSGSTIYYADSVKGRFTISRDNAKNSLYLQMNSLRAEDTAVYYCARDEYNSGWYVLFDYWGQGTLVTVSSASTKGPEVQLVESGGGLVQPGGSLRLSCAASGYTFTNYGMNWVRQAPGKGLEWVGWINTYTGEPTYAADFKRRFTFSLDTSKSTAYLQMNSLRAEDTAVYYCAKYPHYYGSSHWYFDVWGQGTLVTVSS

SEQ ID NO: 259 - protein, 221 aa, Artificial Sequence
  Description of Artificial Sequence: Synthetic polypeptide
DIQMTQSPSSVSASVGDRVTITCRASQGISSWLAWYQQKPGKAPNLLIYEASSLQSGVPSRFGGSGSGTDFTLTISSLQPEDFATYYCQQANGFPWTFGQGTKVEIKRTVAAPDIQMTQSPSSLSASVGDRVTITCSASQDISNYLNWYQQKPGKAPKVLIYFTSSLHSGVPSRFSGSGSGTDFTLTISSLQPEDFATYYCQQYSTVPWTFGQGTKVEIKR

SEQ ID NO: 260 - protein, 258 aa, Artificial Sequence
  Description of Artificial Sequence: Synthetic polypeptide
QVQLVESGGGLVKPGGSLRLSCAASGFTFSDYYMSWIRQAPGKGLEWVSYISSSGSTIYYADSVKGRFTISRDNAKNSLYLQMNSLRAEDTAVYYCARDEYNSGWYVLFDYWGQGTLVTVSSASTKGPSVFPLAPEVQLVESGGGLVQPGGSLRLSCAASGYTFTNYGMNWVRQAPGKGLEWVGWINTYTGEPTYAADFKRRFTFSLDTSKSTAYLQMNSLRAEDTAVYYCAKYPHYYGSSHWYFDVWGQGTLVTVSS

SEQ ID NO: 261 - protein, 228 aa, Artificial Sequence
  Description of Artificial Sequence: Synthetic polypeptide
DIQMTQSPSSVSASVGDRVTITCRASQGISSWLAWYQQKPGKAPNLLIYEASSLQSGVPSRFGGSGSGTDFTLTISSLQPEDFATYYCQQANGFPWTFGQGTKVEIKRTVAAPSVFIFPPDIQMTQSPSSLSASVGDRVTITCSASQDISNYLNWYQQKPGKAPKVLIYFTSSLHSGVPSRFSGSGSGTDFTLTISSLQPEDFATYYCQQYSTVPWTFGQGTKVEIKR

SEQ ID NO: 262 - protein, 258 aa, Artificial Sequence
  Description of Artificial Sequence: Synthetic polypeptide
EVQLVESGGGLVQPGGSLRLSCAASGYTFTNYGMNWVRQAPGKGLEWVGWINTYTGEPTYAADFKRRFTFSLDTSKSTAYLQMNSLRAEDTAVYYCAKYPHYYGSSHWYFDVWGQGTLVTVSSASTKGPSVFPLAPQVQLVESGGGLVKPGGSLRLSCAASGFTFSDYYMSWIRQAPGKGLEWVSYISSSGSTIYYADSVKGRFTISRDNAKNSLYLQMNSLRAEDTAVYYCARDEYNSGWYVLFDYWGQGTLVTVSS

SEQ ID NO: 263 - protein, 228 aa, Artificial Sequence
  Description of Artificial Sequence: Synthetic polypeptide
DIQMTQSPSSLSASVGDRVTITCSASQDISNYLNWYQQKPGKAPKVLIYFTSSLHSGVPSRFSGSGSGTDFTLTISSLQPEDFATYYCQQYSTVPWTFGQGTKVEIKRTVAAPSVFIFPPDIQMTQSPSSVSASVGDRVTITCRASQGISSWLAWYQQKPGKAPNLLIYEASSLQSGVPSRFGGSGSGTDFTLTISSLQPEDFATYYCQQANGFPWTFGQGTKVEIKR

SEQ ID NO: 264 - protein, 258 aa, Artificial Sequence; identical to SEQ ID NO: 260
  Description of Artificial Sequence: Synthetic polypeptide

SEQ ID NO: 265 - protein, 221 aa, Artificial Sequence; identical to SEQ ID NO: 259
  Description of Artificial Sequence: Synthetic polypeptide

SEQ ID NO: 266 - protein, 258 aa, Artificial Sequence; identical to SEQ ID NO: 262
  Description of Artificial Sequence: Synthetic polypeptide

SEQ ID NO: 267 - protein, 221 aa, Artificial Sequence; identical to SEQ ID NO: 257
  Description of Artificial Sequence: Synthetic polypeptide

SEQ ID NO: 268 - protein, 251 aa, Artificial Sequence; identical to SEQ ID NO: 258
  Description of Artificial Sequence: Synthetic polypeptide

SEQ ID NO: 269 - protein, 228 aa, Artificial Sequence; identical to SEQ ID NO: 261
  Description of Artificial Sequence: Synthetic polypeptide

SEQ ID NO: 270 - protein, 251 aa, Artificial Sequence; identical to SEQ ID NO: 256
  Description of Artificial Sequence: Synthetic polypeptide

SEQ ID NO: 271 - protein, 228 aa, Artificial Sequence; identical to SEQ ID NO: 263
  Description of Artificial Sequence: Synthetic polypeptide

SEQ ID NO: 272 - protein, 253 aa, Artificial Sequence
  Description of Artificial Sequence: Synthetic polypeptide
EVQLVESGGGLVQPGGSLRLSCAASGYTFTNYGMNWVRQAPGKGLEWVGWINTYTGEPTYAADFKRRFTFSLDTSKSTAYLQMNSLRAEDTAVYYCAKYPHYYGSSHWYFDVWGQGTLVTVSSASTKGPEVQLVQSGGGLVKPGGSLRLSCAASGFTFSSYAMHWVRQAPGKGLEWVAVISYDGSNKYYADSVKGRFTISRDNSKNTLYLQMNSLRAEDTAVYYCARFSGWPNNYYYYGMDVWGQGTTVTVSS

SEQ ID NO: 273 - protein, 227 aa, Artificial Sequence
  Description of Artificial Sequence: Synthetic polypeptide
DIQMTQSPSSLSASVGDRVTITCSASQDISNYLNWYQQKPGKAPKVLIYFTSSLHSGVPSRFSGSGSGTDFTLTISSLQPEDFATYYCQQYSTVPWTFGQGTKVEIKRTVAAPDVVMTQSPLSLPVTPGEPASISCRSSQSLLHSNGFNYVDWYLQKPGQSPHLLIYFGSYRASGVPDRFSGSGSGTDFTLKISRVEAEDVGVYYCMQALQTPPWTFGQGTKVEIRR

SEQ ID NO: 274 - protein, 253 aa, Artificial Sequence
  Description of Artificial Sequence: Synthetic polypeptide
EVQLVQSGGGLVKPGGSLRLSCAASGFTFSSYAMHWVRQAPGKGLEWVAVISYDGSNKYYADSVKGRFTISRDNSKNTLYLQMNSLRAEDTAVYYCARFSGWPNNYYYYGMDVWGQGTTVTVSSASTKGPEVQLVESGGGLVQPGGSLRLSCAASGYTFTNYGMNWVRQAPGKGLEWVGWINTYTGEPTYAADFKRRFTFSLDTSKSTAYLQMNSLRAEDTAVYYCAKYPHYYGSSHWYFDVWGQGTLVTVSS

SEQ ID NO: 275 - protein, 227 aa, Artificial Sequence
  Description of Artificial Sequence: Synthetic polypeptide
DVVMTQSPLSLPVTPGEPASISCRSSQSLLHSNGFNYVDWYLQKPGQSPHLLIYFGSYRASGVPDRFSGSGSGTDFTLKISRVEAEDVGVYYCMQALQTPPWTFGQGTKVEIRRTVAAPDIQMTQSPSSLSASVGDRVTITCSASQDISNYLNWYQQKPGKAPKVLIYFTSSLHSGVPSRFSGSGSGTDFTLTISSLQPEDFATYYCQQYSTVPWTFGQGTKVEIKR

SEQ ID NO: 276 - protein, 248 aa, Artificial Sequence
  Description of Artificial Sequence: Synthetic polypeptide
EVQLVESGGGLVQPGGSLRLSCAASGYTFTNYGMNWVRQAPGKGLEWVGWINTYTGEPTYAADFKRRFTFSLDTSKSTAYLQMNSLRAEDTAVYYCAKYPHYYGSSHWYFDVWGQGTLVTVSSASTKGPEVQLVESGGGLVQPGGSLRLSCAASGFSFSSEPISWVRQAPGKGLEWVSSITGKNGYTYYADSVKGRFTISADTSKNTAYLQMNSLRAEDTAVYYCARWGKKVYGMDVWGQGTLVTVSS

SEQ ID NO: 277 - protein, 221 aa, Artificial Sequence
  Description of Artificial Sequence: Synthetic polypeptide
DIQMTQSPSSLSASVGDRVTITCSASQDISNYLNWYQQKPGKAPKVLIYFTSSLHSGVPSRFSGSGSGTDFTLTISSLQPEDFATYYCQQYSTVPWTFGQGTKVEIKRTVAAPDIQMTQSPSSLSASVGDRVTITCRASQSISSYLAWYQQKPGKAPKLLIYGASSRASGVPSRFSGSGSGTDFTLTISSLQPEDFATYYCQQYMSVPITFGQGTKVEIKR

SEQ ID NO: 278 - protein, 248 aa, Artificial Sequence
  Description of Artificial Sequence: Synthetic polypeptide
EVQLVESGGGLVQPGGSLRLSCAASGFSFSSEPISWVRQAPGKGLEWVSSITGKNGYTYYADSVKGRFTISADTSKNTAYLQMNSLRAEDTAVYYCARWGKKVYGMDVWGQGTLVTVSSASTKGPEVQLVESGGGLVQPGGSLRLSCAASGYTFTNYGMNWVRQAPGKGLEWVGWINTYTGEPTYAADFKRRFTFSLDTSKSTAYLQMNSLRAEDTAVYYCAKYPHYYGSSHWYFDVWGQGTLVTVSS

SEQ ID NO: 279 - protein, 221 aa, Artificial Sequence
  Description of Artificial Sequence: Synthetic polypeptide
DIQMTQSPSSLSASVGDRVTITCRASQSISSYLAWYQQKPGKAPKLLIYGASSRASGVPSRFSGSGSGTDFTLTISSLQPEDFATYYCQQYMSVPITFGQGTKVEIKRTVAAPDIQMTQSPSSLSASVGDRVTITCSASQDISNYLNWYQQKPGKAPKVLIYFTSSLHSGVPSRFSGSGSGTDFTLTISSLQPEDFATYYCQQYSTVPWTFGQGTKVEIKR

SEQ ID NO: 280 - protein, 255 aa, Artificial Sequence
  Description of Artificial Sequence: Synthetic polypeptide
QVQLQESGPGLVKPSEILSLTCTVSGGSISSHYWSWVRQPPGKGLEWIGYIYYSGSTNYNPSLKSRVTISVDTSKNQFSLNLSSVTAADTAVYYCARIPNYYDRSGYYPGYWYFDLWGRGTLVTVSSASTKGPQVQLVESGGGLVKPGGSLRLSCAASGFTFSDYYMSWIRQAPGKGLEWVSYISSSGSTIYYADSVKGRFTISRDNAKNSLYLQMNSLRAEDTAVYYCARDEYNSGWYVLFDYWGQGTLVTVSS

SEQ ID NO: 281 - protein, 229 aa, Artificial Sequence
  Description of Artificial Sequence: Synthetic polypeptide
QAVLTQPSSLSAPPGASASLTCTLRSGFNVDSYRISWYQQKPGSPPQYLLRYKSDSDKQQGSGVPSRFSGSKDASANAGILLISGLQSEDEADYYCMIWHSSAWVFGGGTKLTVLRTVAAPDIQMTQSPSSVSASVGDRVTITCRASQGISSWLAWYQQKPGKAPNLLIYEASSLQSGVPSRFGGSGSGTDFTLTISSLQPEDFATYYCQQANGFPWTFGQGTKVEIKR

SEQ ID NO: 282 - protein, 255 aa, Artificial Sequence
  Description of Artificial Sequence: Synthetic polypeptide
QVQLVESGGGLVKPGGSLRLSCAASGFTFSDYYMSWIRQAPGKGLEWVSYISSSGSTIYYADSVKGRFTISRDNAKNSLYLQMNSLRAEDTAVYYCARDEYNSGWYVLFDYWGQGTLVTVSSASTKGPQVQLQESGPGLVKPSEILSLTCTVSGGSISSHYWSWVRQPPGKGLEWIGYIYYSGSTNYNPSLKSRVTISVDTSKNQFSLNLSSVTAADTAVYYCARIPNYYDRSGYYPGYWYFDLWGRGTLVTVSS

SEQ ID NO: 283 - protein, 229 aa, Artificial Sequence
  Description of Artificial Sequence: Synthetic polypeptide
DIQMTQSPSSVSASVGDRVTITCRASQGISSWLAWYQQKPGKAPNLLIYEASSLQSGVPSRFGGSGSGTDFTLTISSLQPEDFATYYCQQANGFPWTFGQGTKVEIKRTVAAPQAVLTQPSSLSAPPGASASLTCTLRSGFNVDSYRISWYQQKPGSPPQYLLRYKSDSDKQQGSGVPSRFSGSKDASANAGILLISGLQSEDEADYYCMIWHSSAWVFGGGTKLTVLR

SEQ ID NO: 284 - protein, 252 aa, Artificial Sequence
  Description of Artificial Sequence: Synthetic polypeptide
QVQLQESGPGLVKPSEILSLTCTVSGGSISSHYWSWVRQPPGKGLEWIGYIYYSGSTNYNPSLKSRVTISVDTSKNQFSLNLSSVTAADTAVYYCARIPNYYDRSGYYPGYWYFDLWGRGTLVTVSSASTKGPQVQLKQSGPGLVQPSQSLSITCTVSGFSLTNYGVHWVRQSPGKGLEWLGVIWSGGNTDYNTPFTSRLSINKDNSKSQVFFKMNSLQSNDTAIYYCARALTYYDYEFAYWGQGTLVTVSA

SEQ ID NO: 285 - protein, 229 aa, Artificial Sequence
  Description of Artificial Sequence: Synthetic polypeptide
QAVLTQPSSLSAPPGASASLTCTLRSGFNVDSYRISWYQQKPGSPPQYLLRYKSDSDKQQGSGVPSRFSGSKDASANAGILLISGLQSEDEADYYCMIWHSSAWVFGGGTKLTVLRTVAAPDILLTQSPVILSVSPGERVSFSCRASQSIGTNIHWYQQRTNGSPRLLIKYASESISGIPSRFSGSGSGTDFTLSINSVESEDIADYYCQQNNNWPTTFGAGTKLELKR

SEQ ID NO: 286 - protein, 252 aa, Artificial Sequence
  Description of Artificial Sequence: Synthetic polypeptide
QVQLKQSGPGLVQPSQSLSITCTVSGFSLTNYGVHWVRQSPGKGLEWLGVIWSGGNTDYNTPFTSRLSINKDNSKSQVFFKMNSLQSNDTAIYYCARALTYYDYEFAYWGQGTLVTVSAASTKGPQVQLQESGPGLVKPSEILSLTCTVSGGSISSHYWSWVRQPPGKGLEWIGYIYYSGSTNYNPSLKSRVTISVDTSKNQFSLNLSSVTAADTAVYYCARIPNYYDRSGYYPGYWYFDLWGRGTLVTVSS

SEQ ID NO: 287 - protein, 229 aa, Artificial Sequence
  Description of Artificial Sequence: Synthetic polypeptide
DILLTQSPVILSVSPGERVSFSCRASQSIGTNIHWYQQRTNGSPRLLIKYASESISGIPSRFSGSGSGTDFTLSINSVESEDIADYYCQQNNNWPTTFGAGTKLELKRTVAAPQAVLTQPSSLSAPPGASASLTCTLRSGFNVDSYRISWYQQKPGSPPQYLLRYKSDSDKQQGSGVPSRFSGSKDASANAGILLISGLQSEDEADYYCMIWHSSAWVFGGGTKLTVLR

SEQ ID NO: 288 - protein, 256 aa, Artificial Sequence
  Description of Artificial Sequence: Synthetic polypeptide
QVQLQESGPGLVKPSEILSLTCTVSGGSISSHYWSWVRQPPGKGLEWIGYIYYSGSTNYNPSLKSRVTISVDTSKNQFSLNLSSVTAADTAVYYCARIPNYYDRSGYYPGYWYFDLWGRGTLVTVSSASTKGPEVQLVESGGGLVQPGGSLRLSCAASGYTFTNYGMNWVRQAPGKGLEWVGWINTYTGEPTYAADFKRRFTFSLDTSKSTAYLQMNSLRAEDTAVYYCAKYPHYYGSSHWYFDVWGQGTLVTVSS

SEQ ID NO: 289 - protein, 229 aa, Artificial Sequence
  Description of Artificial Sequence: Synthetic polypeptide
QAVLTQPSSLSAPPGASASLTCTLRSGFNVDSYRISWYQQKPGSPPQYLLRYKSDSDKQQGSGVPSRFSGSKDASANAGILLISGLQSEDEADYYCMIWHSSAWVFGGGTKLTVLRTVAAPDIQMTQSPSSLSASVGDRVTITCSASQDISNYLNWYQQKPGKAPKVLIYFTSSLHSGVPSRFSGSGSGTDFTLTISSLQPEDFATYYCQQYSTVPWTFGQGTKVEIKR

SEQ ID NO: 290 - protein, 256 aa, Artificial Sequence
  Description of Artificial Sequence: Synthetic polypeptide
EVQLVESGGGLVQPGGSLRLSCAASGYTFTNYGMNWVRQAPGKGLEWVGWINTYTGEPTYAADFKRRFTFSLDTSKSTAYLQMNSLRAEDTAVYYCAKYPHYYGSSHWYFDVWGQGTLVTVSSASTKGPQVQLQESGPGLVKPSEILSLTCTVSGGSISSHYWSWVRQPPGKGLEWIGYIYYSGSTNYNPSLKSRVTISVDTSKNQFSLNLSSVTAADTAVYYCARIPNYYDRSGYYPGYWYFDLWGRGTLVTVSS

SEQ ID NO: 291 - protein, 229 aa, Artificial Sequence
  Description of Artificial Sequence: Synthetic polypeptide
DIQMTQSPSSLSASVGDRVTITCSASQDISNYLNWYQQKPGKAPKVLIYFTSSLHSGVPSRFSGSGSGTDFTLTISSLQPEDFATYYCQQYSTVPWTFGQGTKVEIKRTVAAPQAVLTQPSSLSAPPGASASLTCTLRSGFNVDSYRISWYQQKPGSPPQYLLRYKSDSDKQQGSGVPSRFSGSKDASANAGILLISGLQSEDEADYYCMIWHSSAWVFGGGTKLTVLR

SEQ ID NO: 292 - protein, 245 aa, Artificial Sequence
  Description of Artificial Sequence: Synthetic polypeptide
QVQLQESGPGLVKPSETLSLTCTVSGGSVSSGDYYWTWIRQSPGKGLEWIGHIYYSGNTNYNPSLKSRLTISIDTSKTQFSLKLSSVTAADTAIYYCVRDRVTGAFDIWGQGTMVTVSSASTKGPEVQLVESGGGLVQPGGSLRLSCAASGFNIKDTYIHWVRQAPGKGLEWVARIYPTNGYTRYADSVKGRFTISADTSKNTAYLQMNSLRAEDTAVYYCSRWGGDGFYAMDYWGQGTLVTVSS

SEQ ID NO: 293 - protein, 221 aa, Artificial Sequence
  Description of Artificial Sequence: Synthetic polypeptide
DIQMTQSPSSLSASVGDRVTITCQASQDISNYLNWYQQKPGKAPKLLIYDASNLETGVPSRFSGSGSGTDFTFTISSLQPEDIATYFCQHFDHLPLAFGGGTKVEIKRTVAAPDIQMTQSPSSLSASVGDRVTITCRASQDVNTAVAWYQQKPGKAPKLLIYSASFLYSGVPSRFSGSRSGTDFTLTISSLQPEDFATYYCQQHYTTPPTFGQGTKVEIKR

SEQ ID NO: 294 - protein, 245 aa, Artificial Sequence
  Description of Artificial Sequence: Synthetic polypeptide
EVQLVESGGGLVQPGGSLRLSCAASGFNIKDTYIHWVRQAPGKGLEWVARIYPTNGYTRYADSVKGRFTISADTSKNTAYLQMNSLRAEDTAVYYCSRWGGDGFYAMDYWGQGTLVTVSSASTKGPQVQLQESGPGLVKPSETLSLTCTVSGGSVSSGDYYWTWIRQSPGKGLEWIGHIYYSGNTNYNPSLKSRLTISIDTSKTQFSLKLSSVTAADTAIYYCVRDRVTGAFDIWGQGTMVTVSS

SEQ ID NO: 295 - protein, 221 aa, Artificial Sequence
  Description of Artificial Sequence: Synthetic polypeptide
DIQMTQSPSSLSASVGDRVTITCRASQDVNTAVAWYQQKPGKAPKLLIYSASFLYSGVPSRFSGSRSGTDFTLTISSLQPEDFATYYCQQHYTTPPTFGQGTKVEIKRTVAAPDIQMTQSPSSLSASVGDRVTITCQASQDISNYLNWYQQKPGKAPKLLIYDASNLETGVPSRFSGSGSGTDFTFTISSLQPEDIATYFCQHFDHLPLAFGGGTKVEIKR

SEQ ID NO: 296 - protein, 244 aa, Artificial Sequence
  Description of Artificial Sequence: Synthetic polypeptide
QVQLQESGPGLVKPSETLSLTCTVSGGSVSSGDYYWTWIRQSPGKGLEWIGHIYYSGNTNYNPSLKSRLTISIDTSKTQFSLKLSSVTAADTAIYYCVRDRVTGAFDIWGQGTMVTVSSASTKGPQVQLQQSGAELARPGASVKMSCKASGYTFTRYTMHWVKQRPGQGLEWIGYINPSRGYTNYNQKFKDKATLTTDKSSSTAYMQLSSLTSEDSAVYYCARYYDDHYCLDYWGQGTTLTVSS

SEQ ID NO: 297 - protein, 220 aa, Artificial Sequence
  Description of Artificial Sequence: Synthetic polypeptide
DIQMTQSPSSLSASVGDRVTITCQASQDISNYLNWYQQKPGKAPKLLIYDASNLETGVPSRFSGSGSGTDFTFTISSLQPEDIATYFCQHFDHLPLAFGGGTKVEIKRTVAAPQIVLTQSPAIMSASPGEKVTMTCRASSSVSYMNWYQQKSGTSPKRWIYDTSKVASGVPYRFSGSGSGTSYSLTISSMEAEDAATYYCQQWSSNPLTFGSGTKLEINR

SEQ ID NO: 298 - protein, 244 aa, Artificial Sequence
  Description of Artificial Sequence: Synthetic polypeptide
QVQLQQSGAELARPGASVKMSCKASGYTFTRYTMHWVKQRPGQGLEWIGYINPSRGYTNYNQKFKDKATLTTDKSSSTAYMQLSSLTSEDSAVYYCARYYDDHYCLDYWGQGTTLTVSSASTKGPQVQLQESGPGLVKPSETLSLTCTVSGGSVSSGDYYWTWIRQSPGKGLEWIGHIYYSGNTNYNPSLKSRLTISIDTSKTQFSLKLSSVTAADTAIYYCVRDRVTGAFDIWGQGTMVTVSS

SEQ ID NO: 299 - protein, 220 aa, Artificial Sequence
  Description of Artificial Sequence: Synthetic polypeptide
QIVLTQSPAIMSASPGEKVTMTCRASSSVSYMNWYQQKSGTSPKRWIYDTSKVASGVPYRFSGSGSGTSYSLTISSMEAEDAATYYCQQWSSNPLTFGSGTKLEINRTVAAPDIQMTQSPSSLSASVGDRVTITCQASQDISNYLNWYQQKPGKAPKLLIYDASNLETGVPSRFSGSGSGTDFTFTISSLQPEDIATYFCQHFDHLPLAFGGGTKVEIKR

SEQ ID NO: 300 - protein, 250 aa, Artificial Sequence
  Description of Artificial Sequence: Synthetic polypeptide
QVQLQESGPGLVKPSETLSLTCTVSGGSVSSGDYYWTWIRQSPGKGLEWIGHIYYSGNTNYNPSLKSRLTISIDTSKTQFSLKLSSVTAADTAIYYCVRDRVTGAFDIWGQGTMVTVSSASTKGPEVQLLESGGGLVQPGGSLRLSCTASGFTFSSYAMNWVRQAPGKGLEWVSAISGSGGTTFYADSVKGRFTISRDNSRTTLYLQMNSLRAEDTAVYYCAKDLGWSDSYYYYYGMDVWGQGTTVTVSS

SEQ ID NO: 301 - protein, 221 aa, Artificial Sequence
  Description of Artificial Sequence: Synthetic polypeptide
DIQMTQSPSSLSASVGDRVTITCQASQDISNYLNWYQQKPGKAPKLLIYDASNLETGVPSRFSGSGSGTDFTFTISSLQPEDIATYFCQHFDHLPLAFGGGTKVEIKRTVAAPDIQMTQFPSSLSASVGDRVTITCRASQGIRNDLGWYQQKPGKAPKRLIYAASRLHRGVPSRFSGSGSGTEFTLTISSLQPEDFATYYCLQHNSYPCSFGQGTKLEIKR

SEQ ID NO: 302 - protein, 250 aa, Artificial Sequence
  Description of Artificial Sequence: Synthetic polypeptide
EVQLLESGGGLVQPGGSLRLSCTASGFTFSSYAMNWVRQAPGKGLEWVSAISGSGGTTFYADSVKGRFTISRDNSRTTLYLQMNSLRAEDTAVYYCAKDLGWSDSYYYYYGMDVWGQGTTVTVSSASTKGPQVQLQESGPGLVKPSETLSLTCTVSGGSVSSGDYYWTWIRQSPGKGLEWIGHIYYSGNTNYNPSLKSRLTISIDTSKTQFSLKLSSVTAADTAIYYCVRDRVTGAFDIWGQGTMVTVSS

SEQ ID NO: 303 - protein, 221 aa, Artificial Sequence
  Description of Artificial Sequence: Synthetic polypeptide
DIQMTQFPSSLSASVGDRVTITCRASQGIRNDLGWYQQKPGKAPKRLIYAASRLHRGVPSRFSGSGSGTEFTLTISSLQPEDFATYYCLQHNSYPCSFGQGTKLEIKRTVAAPDIQMTQSPSSLSASVGDRVTITCQASQDISNYLNWYQQKPGKAPKLLIYDASNLETGVPSRFSGSGSGTDFTFTISSLQPEDIATYFCQHFDHLPLAFGGGTKVEIKR

SEQ ID NO: 304 - protein, 249 aa, Artificial Sequence
  Description of Artificial Sequence: Synthetic polypeptide
QVQLQESGPGLVKPSETLSLTCTVSGGSVSSGDYYWTWIRQSPGKGLEWIGHIYYSGNTNYNPSLKSRLTISIDTSKTQFSLKLSSVTAADTAIYYCVRDRVTGAFDIWGQGTMVTVSSASTKGPEVQLVQSGGGLVKPGGSLRLSCAASGFTFSSYAMHWVRQAPGKGLEWVAVISYDGSNKYYADSVKGRFTISRDNSKNTLYLQMNSLRAEDTAVYYCARFSGWPNNYYYYGMDVWGQGTTVTVSS

SEQ ID NO: 305 - protein, 227 aa, Artificial Sequence
  Description of Artificial Sequence: Synthetic polypeptide
DIQMTQSPSSLSASVGDRVTITCQASQDISNYLNWYQQKPGKAPKLLIYDASNLETGVPSRFSGSGSGTDFTFTISSLQPEDIATYFCQHFDHLPLAFGGGTKVEIKRTVAAPDVVMTQSPLSLPVTPGEPASISCRSSQSLLHSNGFNYVDWYLQKPGQSPHLLIYFGSYRASGVPDRFSGSGSGTDFTLKISRVEAEDVGVYYCMQALQTPPWTFGQGTKVEIRR

SEQ ID NO: 306 - protein, 249 aa, Artificial Sequence
  Description of Artificial Sequence: Synthetic polypeptide
EVQLVQSGGGLVKPGGSLRLSCAASGFTFSSYAMHWVRQAPGKGLEWVAVISYDGSNKYYADSVKGRFTISRDNSKNTLYLQMNSLRAEDTAVYYCARFSGWPNNYYYYGMDVWGQGTTVTVSSASTKGPQVQLQESGPGLVKPSETLSLTCTVSGGSVSSGDYYWTWIRQSPGKGLEWIGHIYYSGNTNYNPSLKSRLTISIDTSKTQFSLKLSSVTAADTAIYYCVRDRVTGAFDIWGQGTMVTVSS

SEQ ID NO: 307 - protein, 227 aa, Artificial Sequence
  Description of Artificial Sequence: Synthetic polypeptide
DVVMTQSPLSLPVTPGEPASISCRSSQSLLHSNGFNYVDWYLQKPGQSPHLLIYFGSYRASGVPDRFSGSGSGTDFTLKISRVEAEDVGVYYCMQALQTPPWTFGQGTKVEIRRTVAAPDIQMTQSPSSLSASVGDRVTITCQASQDISNYLNWYQQKPGKAPKLLIYDASNLETGVPSRFSGSGSGTDFTFTISSLQPEDIATYFCQHFDHLPLAFGGGTKVEIKR

SEQ ID NO: 308 - protein, 252 aa, Artificial Sequence
  Description of Artificial Sequence: Synthetic polypeptide
QVQLQESGPGLVKPSETLSLTCTVSGGSVSSGDYYWTWIRQSPGKGLEWIGHIYYSGNTNYNPSLKSRLTISIDTSKTQFSLKLSSVTAADTAIYYCVRDRVTGAFDIWGQGTMVTVSSASTKGPQVQLQESGPGLVKPSEILSLTCTVSGGSISSHYWSWVRQPPGKGLEWIGYIYYSGSTNYNPSLKSRVTISVDTSKNQFSLNLSSVTAADTAVYYCARIPNYYDRSGYYPGYWYFDLWGRGTLVTVSS

SEQ ID NO: 309 - protein, 229 aa, Artificial Sequence
  Description of Artificial Sequence: Synthetic polypeptide
DIQMTQSPSSLSASVGDRVTITCQASQDISNYLNWYQQKPGKAPKLLIYDASNLETGVPSRFSGSGSGTDFTFTISSLQPEDIATYFCQHFDHLPLAFGGGTKVEIKRTVAAPQAVLTQPSSLSAPPGASASLTCTLRSGFNVDSYRISWYQQKPGSPPQYLLRYKSDSDKQQGSGVPSRFSGSKDASANAGILLISGLQSEDEADYYCMIWHSSAWVFGGGTKLTVLR

SEQ ID NO: 310 - protein, 252 aa, Artificial Sequence
  Description of Artificial Sequence: Synthetic polypeptide
QVQLQESGPGLVKPSEILSLTCTVSGGSISSHYWSWVRQPPGKGLEWIGYIYYSGSTNYNPSLKSRVTISVDTSKNQFSLNLSSVTAADTAVYYCARIPNYYDRSGYYPGYWYFDLWGRGTLVTVSSASTKGPQVQLQESGPGLVKPSETLSLTCTVSGGSVSSGDYYWTWIRQSPGKGLEWIGHIYYSGNTNYNPSLKSRLTISIDTSKTQFSLKLSSVTAADTAIYYCVRDRVTGAFDIWGQGTMVTVSS

SEQ ID NO: 311 - protein, 229 aa, Artificial Sequence
  Description of Artificial Sequence: Synthetic polypeptide
QAVLTQPSSLSAPPGASASLTCTLRSGFNVDSYRISWYQQKPGSPPQYLLRYKSDSDKQQGSGVPSRFSGSKDASANAGILLISGLQSEDEADYYCMIWHSSAWVFGGGTKLTVLRTVAAPDIQMTQSPSSLSASVGDRVTITCQASQDISNYLNWYQQKPGKAPKLLIYDASNLETGVPSRFSGSGSGTDFTFTISSLQPEDIATYFCQHFDHLPLAFGGGTKVEIKR

SEQ ID NO: 312 - protein, 247 aa, Artificial Sequence
  Description of Artificial Sequence: Synthetic polypeptide
QVQLQESGPGLVKPSETLSLTCTVSGGSVSSGDYYWTWIRQSPGKGLEWIGHIYYSGNTNYNPSLKSRLTISIDTSKTQFSLKLSSVTAADTAIYYCVRDRVTGAFDIWGQGTMVTVSSASTKGPQVQLVESGGGLVKPGGSLRLSCAASGFTFSDYYMSWIRQAPGKGLEWVSYISSSGSTIYYADSVKGRFTISRDNAKNSLYLQMNSLRAEDTAVYYCARDEYNSGWYVLFDYWGQGTLVTVSS

SEQ ID NO: 313 - protein, 221 aa, Artificial Sequence
  Description of Artificial Sequence: Synthetic polypeptide
DIQMTQSPSSLSASVGDRVTITCQASQDISNYLNWYQQKPGKAPKLLIYDASNLETGVPSRFSGSGSGTDFTFTISSLQPEDIATYFCQHFDHLPLAFGGGTKVEIKRTVAAPDIQMTQSPSSVSASVGDRVTITCRASQGISSWLAWYQQKPGKAPNLLIYEASSLQSGVPSRFGGSGSGTDFTLTISSLQPEDFATYYCQQANGFPWTFGQGTKVEIKR

SEQ ID NO: 314 - protein, 247 aa, Artificial Sequence
  Description of Artificial Sequence: Synthetic polypeptide
QVQLVESGGGLVKPGGSLRLSCAASGFTFSDYYMSWIRQAPGKGLEWVSYISSSGSTIYYADSVKGRFTISRDNAKNSLYLQMNSLRAEDTAVYYCARDEYNSGWYVLFDYWGQGTLVTVSSASTKGPQVQLQESGPGLVKPSETLSLTCTVSGGSVSSGDYYWTWIRQSPGKGLEWIGHIYYSGNTNYNPSLKSRLTISIDTSKTQFSLKLSSVTAADTAIYYCVRDRVTGAFDIWGQGTMVTVSS

SEQ ID NO: 315 - protein, 221 aa, Artificial Sequence
  Description of Artificial Sequence: Synthetic polypeptide
DIQMTQSPSSVSASVGDRVTITCRASQGISSWLAWYQQKPGKAPNLLIYEASSLQSGVPSRFGGSGSGTDFTLTISSLQPEDFATYYCQQANGFPWTFGQGTKVEIKRTVAAPDIQMTQSPSSLSASVGDRVTITCQASQDISNYLNWYQQKPGKAPKLLIYDASNLETGVPSRFSGSGSGTDFTFTISSLQPEDIATYFCQHFDHLPLAFGGGTKVEIKR

SEQ ID NO: 316 - protein, 246 aa, Artificial Sequence
  Description of Artificial Sequence: Synthetic polypeptide
QVQLQESGPGLVKPSETLSLTCTVSGGSVSSGDYYWTWIRQSPGKGLEWIGHIYYSGNTNYNPSLKSRLTISIDTSKTQFSLKLSSVTAADTAIYYCVRDRVTGAFDIWGQGTMVTVSSASTKGPQVQLQQSGPELVRPGASVKWSCPASGYTFTSYWLHWVKKQRPGQGLEWIGMIDPSNSDTRFNPPNFKDKATLNVDRSSNTAYNLLSSLTSADSAVYYCATYGSYVSPLDYWGQGTSVYVSS

SEQ ID NO: 317 - protein, 227 aa, Artificial Sequence
  Description of Artificial Sequence: Synthetic polypeptide
DIQMTQSPSSLSASVGDRVTITCQASQDISNYLNWYQQKPGKAPKLLIYDASNLETGVPSRFSGSGSGTDFTFTISSLQPEDIATYFCQHFDHLPLAFGGGTKVEIKRTVAAPDIMMSQSPSSLTVSVGEKVTVSCKSSQSLLVTSSQKNYLAWYQQKPQQSPKLLIYWASTRESGVPDRFTGSGSGTDFTLTITSVKADDLAVYYCQQYYAYPWTFGDGTKLEIKR

SEQ ID NO: 318 - protein, 246 aa, Artificial Sequence
  Description of Artificial Sequence: Synthetic polypeptide
QVQLQQSGPELVRPGASVKWSCPASGYTFTSYWLHWVKKQRPGQGLEWIGMIDPSNSDTRFNPPNFKDKATLNVDRSSNTAYNLLSSLTSADSAVYYCATYGSYVSPLDYWGQGTSVYVSSASTKGPQVQLQESGPGLVKPSETLSLTCTVSGGSVSSGDYYWTWIRQSPGKGLEWIGHIYYSGNTNYNPSLKSRLTISIDTSKTQFSLKLSSVTAADTAIYYCVRDRVTGAFDIWGQGTMVTVSS

SEQ ID NO: 319 - protein, 227 aa, Artificial Sequence
  Description of Artificial Sequence: Synthetic polypeptide
DIMMSQSPSSLTVSVGEKVTVSCKSSQSLLVTSSQKNYLAWYQQKPQQSPKLLIYWASTRESGVPDRFTGSGSGTDFTLTITSVKADDLAVYYCQQYYAYPWTFGDGTKLEIKRTVAAPDIQMTQSPSSLSASVGDRVTITCQASQDISNYLNWYQQKPGKAPKLLIYDASNLETGVPSRFSGSGSGTDFTFTISSLQPEDIATYFCQHFDHLPLAFGGGTKVEIKR

SEQ ID NO: 320 - protein, 248 aa, Artificial Sequence
  Description of Artificial Sequence: Synthetic polypeptide
QVQLQESGPGLVKPSETLSLTCTVSGGSVSSGDYYWTWIRQSPGKGLEWIGHIYYSGNTNYNPSLKSRLTISIDTSKTQFSLKLSSVTAADTAIYYCVRDRVTGAFDIWGQGTMVTVSSASTKGPEVQLVESGGGLVQPGGSLRLSCAASGYTFTNYGMNWVRQAPGKGLEWVGWINTYTGEPTYAADFKRRFTFSLDTSKSTAYLQMNSLRAEDTAVYYCAKYPHYYGSSHWYFDVWGQGTLVTVSS

SEQ ID NO: 321 - protein, 221 aa, Artificial Sequence
  Description of Artificial Sequence: Synthetic polypeptide
DIQMTQSPSSLSASVGDRVTITCQASQDISNYLNWYQQKPGKAPKLLIYDASNLETGVPSRFSGSGSGTDFTFTISSLQPEDIATYFCQHFDHLPLAFGGGTKVEIKRTVAAPDIQMTQSPSSLSASVGDRVTITCSASQDISNYLNWYQQKPGKAPKVLIYFTSSLHSGVPSRFSGSGSGTDFTLTISSLQPEDFATYYCQQYSTVPWTFGQGTKVEIKR

SEQ ID NO: 322 - protein, 248 aa, Artificial Sequence
  Description of Artificial Sequence: Synthetic polypeptide
EVQLVESGGGLVQPGGSLRLSCAASGYTFTNYGMNWVRQAPGKGLEWVGWINTYTGEPTYAADFKRRFTFSLDTSKSTAYLQMNSLRAEDTAVYYCAKYPHYYGSSHWYFDVWGQGTLVTVSSASTKGPQVQLQESGPGLVKPSETLSLTCTVSGGSVSSGDYYWTWIRQSPGKGLEWIGHIYYSGNTNYNPSLKSRLTISIDTSKTQFSLKLSSVTAADTAIYYCVRDRVTGAFDIWGQGTMVTVSS

SEQ ID NO: 323 - protein, 221 aa, Artificial Sequence
  Description of Artificial Sequence: Synthetic polypeptide
DIQMTQSPSSLSASVGDRVTITCSASQDISNYLNWYQQKPGKAPKVLIYFTSSLHSGVPSRFSGSGSGTDFTLTISSLQPEDFATYYCQQYSTVPWTFGQGTKVEIKRTVAAPDIQMTQSPSSLSASVGDRVTITCQASQDISNYLNWYQQKPGKAPKLLIYDASNLETGVPSRFSGSGSGTDFTFTISSLQPEDIATYFCQHFDHLPLAFGGGTKVEIKR

SEQ ID NO: 324 - protein, 251 aa, Artificial Sequence
  Description of Artificial Sequence: Synthetic polypeptide
EVQLVESGGGLVQPGGSLRLSCAASGFTFSSYAMSWVRQAPGKGLEWVSQISPAGGYTNYADSVKGRFTISADTSKNTAYLQMNSLRAEDTAVYYCARELPYYRMSKVMDVQGQGTLVTVSSASTKGPEVQLVESGGGLVQPGGSLRLSCAASGYTFTNYGMNWVRQAPGKGLEWVGWINTYTGEPTYAADFKRRFTFSLDTSKSTAYLQMNSLRAEDTAVYYCAKYPHYYGSSHWYFDVWGQGTLVTVSS

SEQ ID NO: 325 - protein, 221 aa, Artificial Sequence
  Description of Artificial Sequence: Synthetic polypeptide
DIQMTQSPSSLSASVGDRVTITCRASQYFSSYLAWYQQKPGKAPKLLIYGASSRASGVPSRFSGSGSGTDFTLTISSLQPEDFATYYCQQYLGSPPTFGQGTKVEIKRTVAAPDIQMTQSPSSLSASVGDRVTITCSASQDISNYLNWYQQKPGKAPKVLIYFTSSLHSGVPSRFSGSGSGTDFTLTISSLQPEDFATYYCQQYSTVPWTFGQGTKVEIKR

SEQ ID NO: 326 - protein, 251 aa, Artificial Sequence
  Description of Artificial Sequence: Synthetic polypeptide
EVQLVESGGGLVQPGGSLRLSCAASGYTFTNYGMNWVRQAPGKGLEWVGWINTYTGEPTYAADFKRRFTFSLDTSKSTAYLQMNSLRAEDTAVYYCAKYPHYYGSSHWYFDVWGQGTLVTVSSASTKGPEVQLVESGGGLVQPGGSLRLSCAASGFTFSSYAMSWVRQAPGKGLEWVSQISPAGGYTNYADSVKGRFTISADTSKNTAYLQMNSLRAEDTAVYYCARELPYYRMSKVMDVQGQGTLVTVSS

SEQ ID NO: 327 - protein, 221 aa, Artificial Sequence
  Description of Artificial Sequence: Synthetic polypeptide
DIQMTQSPSSLSASVGDRVTITCSASQDISNYLNWYQQKPGKAPKVLIYFTSSLHSGVPSRFSGSGSGTDFTLTISSLQPEDFATYYCQQYSTVPWTFGQGTKVEIKRTVAAPDIQMTQSPSSLSASVGDRVTITCRASQYFSSYLAWYQQKPGKAPKLLIYGASSRASGVPSRFSGSGSGTDFTLTISSLQPEDFATYYCQQYLGSPPTFGQGTKVEIKR

SEQ ID NO: 328 - protein, 246 aa, Artificial Sequence; identical to SEQ ID NO: 118
  Description of Artificial Sequence: Synthetic polypeptide

SEQ ID NO: 329 - protein, 219 aa, Artificial Sequence
  Description of Artificial Sequence: Synthetic polypeptide
QIVLTQSPAIMSASPGEKVTMTCSASSSVSYMNWYQQKSGTSPKRWIYDTSKLASGVPAHFRGSGSGTSYSLTISGMEAEDAATYYCQQWSSNPFTFGSGTKLEINRTVAAPQIVLSQSPAILSPSPGEKVTMTCRASSSVSYIHWFQQKPGSSPKPWIYATSNLASGVPVRFSGSGSGTSYSLTISRVEAEDAATYYCQQWTSNPPTFGGGTKLEIKR

SEQ ID NO: 330 - protein, 246 aa, Artificial Sequence; identical to SEQ ID NO: 116
  Description of Artificial Sequence: Synthetic polypeptide

SEQ ID NO: 331 - protein, 219 aa, Artificial Sequence
  Description of Artificial Sequence: Synthetic polypeptide
QIVLSQSPAILSPSPGEKVTMTCRASSSVSYIHWFQQKPGSSPKPWIYATSNLASGVPVRFSGSGSGTSYSLTISRVEAEDAATYYCQQWTSNPPTFGGGTKLEIKRTVAAPQIVLTQSPAIMSASPGEKVTMTCSASSSVSYMNWYQQKSGTSPKRWIYDTSKLASGVPAHFRGSGSGTSYSLTISGMEAEDAATYYCQQWSSNPFTFGSGTKLEINR

SEQ ID NO: 332 - protein, 245 aa, Artificial Sequence; identical to SEQ ID NO: 132
  Description of Artificial Sequence: Synthetic polypeptide

SEQ ID NO: 333 - protein, 220 aa, Artificial Sequence
  Description of Artificial Sequence: Synthetic polypeptide
QIVLTQSPAIMSASPGEKVTMTCSASSSVSYMNWYQQKSGTSPKRWIYDTSKLASGVPAHFRGSGSGTSYSLTISGMEAEDAATYYCQQWSSNPFTFGSGTKLEINRTVAAPDIQMTQSPSSLSASVGDRVTITCRASQDVNTAVAWYQQKPGKAPKLLIYSASFLYSGVPSRFSGSRSGTDFTLTISSLQPEDFATYYCQQHYTTPPTFGQGTKVEIKR

SEQ ID NO: 334 - protein, 245 aa, Artificial Sequence; identical to SEQ ID NO: 134
  Description of Artificial Sequence: Synthetic polypeptide

SEQ ID NO: 335 - protein, 220 aa, Artificial Sequence
  Description of Artificial Sequence: Synthetic polypeptide
DIQMTQSPSSLSASVGDRVTITCRASQDVNTAVAWYQQKPGKAPKLLIYSASFLYSGVPSRFSGSRSGTDFTLTISSLQPEDFATYYCQQHYTTPPTFGQGTKVEIKRTVAAPQIVLTQSPAIMSASPGEKVTMTCSASSSVSYMNWYQQKSGTSPKRWIYDTSKLASGVPAHFRGSGSGTSYSLTISGMEAEDAATYYCQQWSSNPFTFGSGTKLEINR

SEQ ID NO: 336 - protein, 249 aa, Artificial Sequence; identical to SEQ ID NO: 136
  Description of Artificial Sequence: Synthetic polypeptide

SEQ ID NO: 337 - protein, 224 aa, Artificial Sequence
  Description of Artificial Sequence: Synthetic polypeptide
QIVLTQSPAIMSASPGEKVTMTCSASSSVSYMNWYQQKSGTSPKRWIYDTSKLASGVPAHFRGSGSGTSYSLTISGMEAEDAATYYCQQWSSNPFTFGSGTKLEINRTVAAPDILLTQTPASLAVSLGQRATISCKASQSVDYDGDSYLNWYQQIPGQPPKLLIYDASNLVSGIPPRFSGSGSGTDFTLNIHPVEKVDAATYHCQQSTEDPWTFGGGTKLEIKR

SEQ ID NO: 338 - protein, 249 aa, Artificial Sequence; identical to SEQ ID NO: 138
  Description of Artificial Sequence: Synthetic polypeptide

SEQ ID NO: 339 - protein, 224 aa, Artificial Sequence
  Description of Artificial Sequence: Synthetic polypeptide
DILLTQTPASLAVSLGQRATISCKASQSVDYDGDSYLNWYQQIPGQPPKLLIYDASNLVSGIPPRFSGSGSGTDFTLNIHPVEKVDAATYHCQQSTEDPWTFGGGTKLEIKRTVAAPQIVLTQSPAIMSASPGEKVTMTCSASSSVSYMNWYQQKSGTSPKRWIYDTSKLASGVPAHFRGSGSGTSYSLTISGMEAEDAATYYCQQWSSNPFTFGSGTKLEINR

SEQ ID NO: 340 - protein, 244 aa, Artificial Sequence; identical to SEQ ID NO: 146
  Description of Artificial Sequence: Synthetic polypeptide

SEQ ID NO: 341 - protein, 220 aa, Artificial Sequence
  Description of Artificial Sequence: Synthetic polypeptide
QIVLTQSPAIMSASPGEKVTMTCSASSSVSYMNWYQQKSGTSPKRWIYDTSKLASGVPAHFRGSGSGTSYSLTISGMEAEDAATYYCQQWSSNPFTFGSGTKLEINRTVAAPDILLTQSPVILSVSPGERVSFSCRASQSIGTNIHWYQQRTNGSPRLLIKYASESISGIPSRFSGSGSGTDFTLSINSVESEDIADYYCQQNNNWPTTFGAGTKLELKR

SEQ ID NO: 342 - protein, 244 aa, Artificial Sequence; identical to SEQ ID NO: 144
  Description of Artificial Sequence: Synthetic polypeptide

SEQ ID NO: 343 - protein, 220 aa, Artificial Sequence
  Description of Artificial Sequence: Synthetic polypeptide
DILLTQSPVILSVSPGERVSFSCRASQSIGTNIHWYQQRTNGSPRLLIKYASESISGIPSRFSGSGSGTDFTLSINSVESEDIADYYCQQNNNWPTTFGAGTKLELKRTVAAPQIVLTQSPAIMSASPGEKVTMTCSASSSVSYMNWYQQKSGTSPKRWIYDTSKLASGVPAHFRGSGSGTSYSLTISGMEAEDAATYYCQQWSSNPFTFGSGTKLEINR

SEQ ID NO: 344 - protein, 244 aa, Artificial Sequence; identical to SEQ ID NO: 298
  Description of Artificial Sequence: Synthetic polypeptide

SEQ ID NO: 345 - protein, 220 aa, Artificial Sequence
  Description of Artificial Sequence: Synthetic polypeptide
QIVLTQSPAIMSASPGEKVTMTCSASSSVSYMNWYQQKSGTSPKRWIYDTSKLASGVPAHFRGSGSGTSYSLTISGMEAEDAATYYCQQWSSNPFTFGSGTKLEINRTVAAPDIQMTQSPSSLSASVGDRVTITCQASQDISNYLNWYQQKPGKAPKLLIYDASNLETGVPSRFSGSGSGTDFTFTISSLQPEDIATYFCQHFDHLPLAFGGGTKVEIKR

SEQ ID NO: 346 - protein, 244 aa, Artificial Sequence; identical to SEQ ID NO: 296
  Description of Artificial Sequence: Synthetic polypeptide

SEQ ID NO: 347 - protein, 220 aa, Artificial Sequence
  Description of Artificial Sequence: Synthetic polypeptide
DIQMTQSPSSLSASVGDRVTITCQASQDISNYLNWYQQKPGKAPKLLIYDASNLETGVPSRFSGSGSGTDFTFTISSLQPEDIATYFCQHFDHLPLAFGGGTKVEIKRTVAAPQIVLTQSPAIMSASPGEKVTMTCSASSSVSYMNWYQQKSGTSPKRWIYDTSKLASGVPAHFRGSGSGTSYSLTISGMEAEDAATYYCQQWSSNPFTFGSGTKLEINR

SEQ ID NO: 348 - protein, 245 aa, Artificial Sequence
  Description of Artificial Sequence: Synthetic polypeptide
QVQLQESGPGLVKPSETLSLTCTVSGGSVSSGDYYWTWIRQSPGKGLEWIGHIYYSGNTNYNPSLKSRLTISIDTSKTQFSLKLSSVTAADTAIYYCVRDRVTGAFDIWGQGTMVTVSSASTKGPQVQLVQSGAEVKKPGASVKVSCKASGYTFTSYDINWVRQATGQGLEWMGWMNPNSGNTGYAQKFQGRVTMTRNTSISTAYMELSSLRSEDTAVYYCARDPYYYYYGMDVWGQGTTVTVSS

SEQ ID NO: 349 - protein, 225 aa, Artificial Sequence
  Description of Artificial Sequence: Synthetic polypeptide
DIQMTQSPSSLSASVGDRVTITCQASQDISNYLNWYQQKPGKAPKLLIYDASNLETGVPSRFSGSGSGTDFTFTISSLQPEDIATYFCQHFDHLPLAFGGGTKVEIKRTVAAPQSVLTQPPSVSAAPGQKVTISCSGSSSNIENNHVSWYQQLPGTAPKLLIYDNNKRPSGIPDRFSGSKSGTSATLGITGLQTGDEADYYCETWDTSLSAGRVFGGGTKLTVLG

SEQ ID NO: 350 - protein, 245 aa, Artificial Sequence
  Description of Artificial Sequence: Synthetic polypeptide
QVQLVQSGAEVKKPGASVKVSCKASGYTFTSYDINWVRQATGQGLEWMGWMNPNSGNTGYAQKFQGRVTMTRNTSISTAYMELSSLRSEDTAVYYCARDPYYYYYGMDVWGQGTTVTVSSASTKGPQVQLQESGPGLVKPSETLSLTCTVSGGSVSSGDYYWTWIRQSPGKGLEWIGHIYYSGNTNYNPSLKSRLTISIDTSKTQFSLKLSSVTAADTAIYYCVRDRVTGAFDIWGQGTMVTVSS

SEQ ID NO: 351 - protein, 226 aa, Artificial Sequence
  Description of Artificial Sequence: Synthetic polypeptide
QSVLTQPPSVSAAPGQKVTISCSGSSSNIENNHVSWYQQLPGTAPKLLIYDNNKRPSGIPDRFSGSKSGTSATLGITGLQTGDEADYYCETWDTSLSAGRVFGGGTKLTVLGQPKAAPDIQMTQSPSSLSASVGDRVTITCQASQDISNYLNWYQQKPGKAPKLLIYDASNLETGVPSRFSGSGSGTDFTFTISSLQPEDIATYFCQHFDHLPLAFGGGTKVEIKR

SEQ ID NO: 352 - protein, 240 aa, Artificial Sequence
  Description of Artificial Sequence: Synthetic polypeptide
EVQLVESGGGLVQPGGSLRLSCAASGFTFTDNWISWVRQAPGKGLEWVGYISPNSGFTYYADSVKGRFTISADTSKNTAYLQMNSLRAEDTAVYYCARDNFGGYFDYWGQGTLVTVSSASTKGPQVQLQQSGAELVKPGASVKISCKASGYTFTDYYINWVKLAPGQGLEWIGWIYPGSGNTKYNEKFKGKATLTIDTSSSTAYMQLSSLTSEDTAVYFCVRDSPFFDYWGQGTLLTVSS

SEQ ID NO: 353 - protein, 227 aa, Artificial Sequence
  Description of Artificial Sequence: Synthetic polypeptide
DIQMTQSPSSLSASVGDRVTITCRASQDVSTAVAWYQQKPGKAPKLLIYSASFLYSGVPSRFSGSGSGTDFTLTISSLQPEDFATTYYCQQSYTGTVTFGQGTKVEIKRTVAAPDIVLTQSPDSLAVSLGERVTMNCKSSQSLLNSGMRKSFLAWYQQKPGQSPKLLIYWASTRESGVPDRFTGSGSGTDFTLTISSVQAEDVAVYYCKQSYHLFTFGSGTKLEIKR

SEQ ID NO: 354 - protein, 240 aa, Artificial Sequence
  Description of Artificial Sequence: Synthetic polypeptide
QVQLQQSGAELVKPGASVKISCKASGYTFTDYYINWVKLAPGQGLEWIGWIYPGSGNTKYNEKFKGKATLTIDTSSSTAYMQLSSLTSEDTAVYFCVRDSPFFDYWGQGTLLTVSSASTKGPEVQLVESGGGLVQPGGSLRLSCAASGFTFTDNWISWVRQAPGKGLEWVGYISPNSGFTYYADSVKGRFTISADTSKNTAYLQMNSLRAEDTAVYYCARDNFGGYFDYWGQGTLVTVSS

SEQ ID NO: 355 - protein, 227 aa, Artificial Sequence
  Description of Artificial Sequence: Synthetic polypeptide
DIVLTQSPDSLAVSLGERVTMNCKSSQSLLNSGMRKSFLAWYQQKPGQSPKLLIYWASTRESGVPDRFTGSGSGTDFTLTISSVQAEDVAVYYCKQSYHLFTFGSGTKLEIKRTVAAPDIQMTQSPSSLSASVGDRVTITCRASQDVSTAVAWYQQKPGKAPKLLIYSASFLYSGVPSRFSGSGSGTDFTLTISSLQPEDFATTYYCQQSYTGTVTFGQGTKVEIKR

SEQ ID NO: 356 - protein, 245 aa, Artificial Sequence
  Description of Artificial Sequence: Synthetic polypeptide
EVQLVESGGGLVQPGGSLRLSCAASGYTFTNYGMNWVRQAPGKGLEWVGWINTYTGEPTYAADFKRRFTFSLDTSKSTAYLQMNSLRAEDTAVYYCAKYPHYYGSSHWYFDVWGQGTLVTVSSASTKGPQVQLQQSGAELVKPGASVKISCKASGYTFTDYYINWVKLAPGQGLEWIGWIYPGSGNTKYNEKFKGKATLTIDTSSSTAYMQLSSLTSEDTAVYFCVRDSPFFDYWGQGTLLTVSS

SEQ ID NO: 357 - protein, 226 aa, Artificial Sequence
  Description of Artificial Sequence: Synthetic polypeptide
DIQMTQSPSSLSASVGDRVTITCSASQDISNYLNWYQQKPGKAPKVLIYFTSSLHSGVPSRFSGSGSGTDFTLTISSLQPEDFATYYCQQYSTVPWTFGQGTKVEIKRTVAAPDIVLTQSPDSLAVSLGERVTMNCKSSQSLLNSGMRKSFLAWYQQKPGQSPKLLIYWASTRESGVPDRFTGSGSGTDFTLTISSVQAEDVAVYYCKQSYHLFTFGSGTKLEIKR

SEQ ID NO: 358 - protein, 245 aa, Artificial Sequence
  Description of Artificial Sequence: Synthetic polypeptide
QVQLQQSGAELVKPGASVKISCKASGYTFTDYYINWVKLAPGQGLEWIGWIYPGSGNTKYNEKFKGKATLTIDTSSSTAYMQLSSLTSEDTAVYFCVRDSPFFDYWGQGTLLTVSSASTKGPEVQLVESGGGLVQPGGSLRLSCAASGYTFTNYGMNWVRQAPGKGLEWVGWINTYTGEPTYAADFKRRFTFSLDTSKSTAYLQMNSLRAEDTAVYYCAKYPHYYGSSHWYFDVWGQGTLVTVSS

SEQ ID NO: 359 - protein, 226 aa, Artificial Sequence
  Description of Artificial Sequence: Synthetic polypeptide
DIVLTQSPDSLAVSLGERVTMNCKSSQSLLNSGMRKSFLAWYQQKPGQSPKLLIYWASTRESGVPDRFTGSGSGTDFTLTISSVQAEDVAVYYCKQSYHLFTFGSGTKLEIKRTVAAPDIQMTQSPSSLSASVGDRVTITCSASQDISNYLNWYQQKPGKAPKVLIYFTSSLHSGVPSRFSGSGSGTDFTLTISSLQPEDFATYYCQQYSTVPWTFGQGTKVEIKR

SEQ ID NO: 360 - protein, 252 aa, Artificial Sequence
  Description of Artificial Sequence: Synthetic polypeptide
QVQLQQSGAELVKPGASVKISCKASGYTFTDYYINWVKLAPGQGLEWIGWIYPGSGNTKYNEKFKGKATLTIDTSSSTAYMQLSSLTSEDTAVYFCVRDSPFFDYWGQGTLLTVSSASTKGPSVFPLAPEVQLVESGGGLVQPGGSLRLSCAASGYTFTNYGMNWVRQAPGKGLEWVGWINTYTGEPTYAADFKRRFTFSLDTSKSTAYLQMNSLRAEDTAVYYCAKYPHYYGSSHWYFDVWGQGTLVTVSS

SEQ ID NO: 361 - protein, 233 aa, Artificial Sequence
  Description of Artificial Sequence: Synthetic polypeptide
DIVLTQSPDSLAVSLGERVTMNCKSSQSLLNSGMRKSFLAWYQQKPGQSPKLLIYWASTRESGVPDRFTGSGSGTDFTLTISSVQAEDVAVYYCKQSYHLFTFGSGTKLEIKRTVAAPSVFIFPPDIQMTQSPSSLSASVGDRVTITCSASQDISNYLNWYQQKPGKAPKVLIYFTSSLHSGVPSRFSGSGSGTDFTLTISSLQPEDFATYYCQQYSTVPWTFGQGTKVEIKR

SEQ ID NO: 362 - protein, 252 aa, Artificial Sequence
  Description of Artificial Sequence: Synthetic polypeptide
EVQLVESGGGLVQPGGSLRLSCAASGYTFTNYGMNWVRQAPGKGLEWVGWINTYTGEPTYAADFKRRFTFSLDTSKSTAYLQMNSLRAEDTAVYYCAKYPHYYGSSHWYFDVWGQGTLVTVSSASTKGPSVFPLAPQVQLQQSGAELVKPGASVKISCKASGYTFTDYYINWVKLAPGQGLEWIGWIYPGSGNTKYNEKFKGKATLTIDTSSSTAYMQLSSLTSEDTAVYFCVRDSPFFDYWGQGTLLTVSS

SEQ ID NO: 363 - protein, 233 aa, Artificial Sequence
  Description of Artificial Sequence: Synthetic polypeptide
DIQMTQSPSSLSASVGDRVTITCSASQDISNYLNWYQQKPGKAPKVLIYFTSSLHSGVPSRFSGSGSGTDFTLTISSLQPEDFATYYCQQYSTVPWTFGQGTKVEIKRTVAAPSVFIFPPDIVLTQSPDSLAVSLGERVTMNCKSSQSLLNSGMRKSFLAWYQQKPGQSPKLLIYWASTRESGVPDRFTGSGSGTDFTLTISSVQAEDVAVYYCKQSYHLFTFGSGTKLEIKR

SEQ ID NO: 364 - protein, 252 aa, Artificial Sequence; identical to SEQ ID NO: 360
  Description of Artificial Sequence: Synthetic polypeptide

SEQ ID NO: 365 - protein, 226 aa, Artificial Sequence; identical to SEQ ID NO: 359
  Description of Artificial Sequence: Synthetic polypeptide

SEQ ID NO: 366 - protein, 252 aa, Artificial Sequence; identical to SEQ ID NO: 362
  Description of Artificial Sequence: Synthetic polypeptide

SEQ ID NO: 367 - protein, 226 aa, Artificial Sequence; identical to SEQ ID NO: 357
  Description of Artificial Sequence: Synthetic polypeptide

SEQ ID NO: 368 - protein, 245 aa, Artificial Sequence; identical to SEQ ID NO: 358
  Description of Artificial Sequence: Synthetic polypeptide

SEQ ID NO: 369 - protein, 233 aa, Artificial Sequence; identical to SEQ ID NO: 361
  Description of Artificial Sequence: Synthetic polypeptide

SEQ ID NO: 370 - protein, 245 aa, Artificial Sequence; identical to SEQ ID NO: 356
  Description of Artificial Sequence: Synthetic polypeptide

SEQ ID NO: 371 - protein, 233 aa, Artificial Sequence; identical to SEQ ID NO: 363
  Description of Artificial Sequence: Synthetic polypeptide

SEQ ID NO: 372 - protein, 242 aa, Artificial Sequence
  Description of Artificial Sequence: Synthetic polypeptide
QVQLQQWGAGLLKPSETLSLTCAVYGGSFSGYYWSWIRQPPGKGLEWIGEINHSGSTNYNPSLKSRVTISVETSKNQFSLKLSSVTAADTAVYYCARDKWTWYFDLWGRGTLVTVSSASTKGPQVQLKQSGPGLVQPSQSLSITCTVSGFSLTNYGVHWVRQSPGKGLEWLGVIWSGGNTDYNTPFTSRLSINKDNSKSQVFFKMNSLQSNDTAIYYCARALTYYDYEFAYWGQGTLVTVSA

SEQ ID NO: 373 - protein, 227 aa, Artificial Sequence
  Description of Artificial Sequence: Synthetic polypeptide
DIEMTQSPDSLAVSLGERATINCRSSQSVLYSSSNRNYLAWYQQNPGQPPKLLIYWASTRESGVPDRFSGSGSGTDFTLTISSLQAEDVAVYYCQQYYSTPRTFGQGTKVEIKRTVAAPDILLTQSPVILSVSPGERVSFSCRASQSIGTNIHWYQQRTNGSPRLLIKYASESISGIPSRFSGSGSGTDFTLSINSVESEDIADYYCQQNNNWPTTFGAGTKLELKR

SEQ ID NO: 374 - protein, 242 aa, Artificial Sequence
  Description of Artificial Sequence: Synthetic polypeptide
QVQLKQSGPGLVQPSQSLSITCTVSGFSLTNYGVHWVRQSPGKGLEWLGVIWSGGNTDYNTPFTSRLSINKDNSKSQVFFKMNSLQSNDTAIYYCARALTYYDYEFAYWGQGTLVTVSAASTKGPQVQLQQWGAGLLKPSETLSLTCAVYGGSFSGYYWSWIRQPPGKGLEWIGEINHSGSTNYNPSLKSRVTISVETSKNQFSLKLSSVTAADTAVYYCARDKWTWYFDLWGRGTLVTVSS

SEQ ID NO: 375 - protein, 227 aa, Artificial Sequence
  Description of Artificial Sequence: Synthetic polypeptide
DILLTQSPVILSVSPGERVSFSCRASQSIGTNIHWYQQRTNGSPRLLIKYASESISGIPSRFSGSGSGTDFTLSINSVESEDIADYYCQQNNNWPTTFGAGTKLELKRTVAAPDIEMTQSPDSLAVSLGERATINCRSSQSVLYSSSNRNYLAWYQQNPGQPPKLLIYWASTRESGVPDRFSGSGSGTDFTLTISSLQAEDVAVYYCQQYYSTPRTFGQGTKVEIKR

SEQ ID NO: 376 - protein, 249 aa, Artificial Sequence
  Description of Artificial Sequence: Synthetic polypeptide
QVQLQQWGAGLLKPSETLSLTCAVYGGSFSGYYWSWIRQPPGKGLEWIGEINHSGSTNYNPSLKSRVTISVETSKNQFSLKLSSVTAADTAVYYCARDKWTWYFDLWGRGTLVTVSSASTKGPSVFPLAPQVQLKQSGPGLVQPSQSLSITCTVSGFSLTNYGVHWVRQSPGKGLEWLGVIWSGGNTDYNTPFTSRLSINKDNSKSQVFFKMNSLQSNDTAIYYCARALTYYDYEFAYWGQGTLVTVSA

SEQ ID NO: 377 - protein, 234 aa, Artificial Sequence
  Description of Artificial Sequence: Synthetic polypeptide
DIEMTQSPDSLAVSLGERATINCRSSQSVLYSSSNRNYLAWYQQNPGQPPKLLIYWASTRESGVPDRFSGSGSGTDFTLTISSLQAEDVAVYYCQQYYSTPRTFGQGTKVEIKRTVAAPSVFIFPPDILLTQSPVILSVSPGERVSFSCRASQSIGTNIHWYQQRTNGSPRLLIKYASESISGIPSRFSGSGSGTDFTLSINSVESEDIADYYCQQNNNWPTTFGAGTKLELKR

SEQ ID NO: 378 - protein, 249 aa, Artificial Sequence
  Description of Artificial Sequence: Synthetic polypeptide
QVQLKQSGPGLVQPSQSLSITCTVSGFSLTNYGVHWVRQSPGKGLEWLGVIWSGGNTDYNTPFTSRLSINKDNSKSQVFFKMNSLQSNDTAIYYCARALTYYDYEFAYWGQGTLVTVSAASTKGPSVFPLAPQVQLQQWGAGLLKPSETLSLTCAVYGGSFSGYYWSWIRQPPGKGLEWIGEINHSGSTNYNPSLKSRVTISVETSKNQFSLKLSSVTAADTAVYYCARDKWTWYFDLWGRGTLVTVSS

SEQ ID NO: 379 - protein, 234 aa, Artificial Sequence
  Description of Artificial Sequence: Synthetic polypeptide
DILLTQSPVILSVSPGERVSFSCRASQSIGTNIHWYQQRTNGSPRLLIKYASESISGIPSRFSGSGSGTDFTLSINSVESEDIADYYCQQNNNWPTTFGAGTKLELKRTVAAPSVFIFPPDIEMTQSPDSLAVSLGERATINCRSSQSVLYSSSNRNYLAWYQQNPGQPPKLLIYWASTRESGVPDRFSGSGSGTDFTLTISSLQAEDVAVYYCQQYYSTPRTFGQGTKVEIKR

SEQ ID NO: 380 - protein, 249 aa, Artificial Sequence; identical to SEQ ID NO: 376
  Description of Artificial Sequence: Synthetic polypeptide

SEQ ID NO: 381 - protein, 227 aa, Artificial Sequence; identical to SEQ ID NO: 373
  Description of Artificial Sequence: Synthetic polypeptide

SEQ ID NO: 382 - protein, 249 aa, Artificial Sequence; identical to SEQ ID NO: 378
  Description of Artificial Sequence: Synthetic polypeptide

SEQ ID NO: 383 - protein, 227 aa, Artificial Sequence; identical to SEQ ID NO: 375
  Description of Artificial Sequence: Synthetic polypeptide

SEQ ID NO: 384 - protein, 242 aa, Artificial Sequence; identical to SEQ ID NO: 372
  Description of Artificial Sequence: Synthetic polypeptide

SEQ ID NO: 385 - protein, 234 aa, Artificial Sequence; identical to SEQ ID NO: 377
  Description of Artificial Sequence: Synthetic polypeptide

SEQ ID NO: 386 - protein, 242 aa, Artificial Sequence; identical to SEQ ID NO: 374
  Description of Artificial Sequence: Synthetic polypeptide

SEQ ID NO: 387 - protein, 234 aa, Artificial Sequence; identical to SEQ ID NO: 379
  Description of Artificial Sequence: Synthetic polypeptide

SEQ ID NO: 388 - protein, 242 aa, Artificial Sequence
  Description of Artificial Sequence: Synthetic polypeptide
QVQLQQWGAGLLKPSETLSLTCAVYGGSFSGYYWSWIRQPPGKGLEWIGEINHSGSTNYNPSLKSRVTISVETSKNQFSLKLSSVTAADTAVYYCARDKWTWYFDLWGRGTLVTVSSASTKGPQVQLQESGPGLVKPSETLSLTCTVSGGSVSSGDYYWTWIRQSPGKGLEWIGHIYYSGNTNYNPSLKSRLTISIDTSKTQFSLKLSSVTAADTAIYYCVRDRVTGAFDIWGQGTMVTVSS

SEQ ID NO: 389 - protein, 227 aa, Artificial Sequence
  Description of Artificial Sequence: Synthetic polypeptide
DIEMTQSPDSLAVSLGERATINCRSSQSVLYSSSNRNYLAWYQQNPGQPPKLLIYWASTRESGVPDRFSGSGSGTDFTLTISSLQAEDVAVYYCQQYYSTPRTFGQGTKVEIKRTVAAPDIQMTQSPSSLSASVGDRVTITCQASQDISNYLNWYQQKPGKAPKLLIYDASNLETGVPSRFSGSGSGTDFTFTISSLQPEDIATYFCQHFDHLPLAFGGGTKVEIKR

SEQ ID NO: 390 - protein, 242 aa, Artificial Sequence
  Description of Artificial Sequence: Synthetic polypeptide
QVQLQESGPGLVKPSETLSLTCTVSGGSVSSGDYYWTWIRQSPGKGLEWIGHIYYSGNTNYNPSLKSRLTISIDTSKTQFSLKLSSVTAADTAIYYCVRDRVTGAFDIWGQGTMVTVSSASTKGPQVQLQQWGAGLLKPSETLSLTCAVYGGSFSGYYWSWIRQPPGKGLEWIGEINHSGSTNYNPSLKSRVTISVETSKNQFSLKLSSVTAADTAVYYCARDKWTWYFDLWGRGTLVTVSS

SEQ ID NO: 391 - protein, 227 aa, Artificial Sequence
  Description of Artificial Sequence: Synthetic polypeptide
DIQMTQSPSSLSASVGDRVTITCQASQDISNYLNWYQQKPGKAPKLLIYDASNLETGVPSRFSGSGSGTDFTFTISSLQPEDIATYFCQHFDHLPLAFGGGTKVEIKRTVAAPDIEMTQSPDSLAVSLGERATINCRSSQSVLYSSSNRNYLAWYQQNPGQPPKLLIYWASTRESGVPDRFSGSGSGTDFTLTISSLQAEDVAVYYCQQYYSTPRTFGQGTKVEIKR

SEQ ID NO: 392 - protein, 245 aa, Artificial Sequence
  Description of Artificial Sequence: Synthetic polypeptide
QVQLQQWGAGLLKPSETLSLTCAVYGGSFSGYYWSWIRQPPGKGLEWIGEINHSGSTNYNPSLKSRVTISVETSKNQFSLKLSSVTAADTAVYYCARDKWTWYFDLWGRGTLVTVSSASTKGPQVQLVESGGGLVKPGGSLRLSCAASGFTFSDYYMSWIRQAPGKGLEWVSYISSSGSTIYYADSVKGRFTISRDNAKNSLYLQMNSLRAEDTAVYYCARDEYNSGWYVLFDYWGQGTLVTVSS

SEQ ID NO: 393 - protein, 227 aa, Artificial Sequence
  Description of Artificial Sequence: Synthetic polypeptide
DIEMTQSPDSLAVSLGERATINCRSSQSVLYSSSNRNYLAWYQQNPGQPPKLLIYWASTRESGVPDRFSGSGSGTDFTLTISSLQAEDVAVYYCQQYYSTPRTFGQGTKVEIKRTVAAPDIQMTQSPSSVSASVGDRVTITCRASQGISSWLAWYQQKPGKAPNLLIYEASSLQSGVPSRFGGSGSGTDFTLTISSLQPEDFATYYCQQANGFPWTFGQGTKVEIKR

SEQ ID NO: 394 - protein, 245 aa, Artificial Sequence
  Description of Artificial Sequence: Synthetic polypeptide
QVQLVESGGGLVKPGGSLRLSCAASGFTFSDYYMSWIRQAPGKGLEWVSYISSSGSTIYYADSVKGRFTISRDNAKNSLYLQMNSLRAEDTAVYYCARDEYNSGWYVLFDYWGQGTLVTVSSASTKGPQVQLQQWGAGLLKPSETLSLTCAVYGGSFSGYYWSWIRQPPGKGLEWIGEINHSGSTNYNPSLKSRVTISVETSKNQFSLKLSSVTAADTAVYYCARDKWTWYFDLWGRGTLVTVSS

SEQ ID NO: 395 - protein, 227 aa, Artificial Sequence
  Description of Artificial Sequence: Synthetic polypeptide
DIQMTQSPSSVSASVGDRVTITCRASQGISSWLAWYQQKPGKAPNLLIYEASSLQSGVPSRFGGSGSGTDFTLTISSLQPEDFATYYCQQANGFPWTFGQGTKVEIKRTVAAPDIEMTQSPDSLAVSLGERATINCRSSQSVLYSSSNRNYLAWYQQNPGQPPKLLIYWASTRESGVPDRFSGSGSGTDFTLTISSLQAEDVAVYYCQQYYSTPRTFGQGTKVEIKR

SEQ ID NO: 396 - protein, 244 aa, Artificial Sequence
  Description of Artificial Sequence: Synthetic polypeptide
EVQLVESGGGLVQPGGSLRLSCAASGFTFSIYSMNWVRQAPGKGLEWVSYISSSSSTIYYADSVKGRFTISRDNAKNSLYLQMNSLRDEDTAVYYCARDRGDFDAFDIWGQGTMVTVSSASTKGPQVQLKQSGPGLVQPSQSLSITCTVSGFSLTNYGVHWVRQSPGKGLEWLGVIWSGGNTDYNTPFTSRLSINKDNSKSQVFFKMNSLQSNDTAIYYCARALTYYDYEFAYWGQGTLVTVSA

SEQ ID NO: 397 - protein, 221 aa, Artificial Sequence
  Description of Artificial Sequence: Synthetic polypeptide
DIQMTQSPSSLSASVGDRVTITCQASQDITNYLNWYQQKPGKAPKLLIYDASNLETGVPSRFSGSGSGTDFTFTISSLQPEDIATYNCQQCENFPITFGQGTRLEIKRTVAAPDILLTQSPVILSVSPGERVSFSCRASQSIGTNIHWYQQRTNGSPRLLIKYASESISGIPSRFSGSGSGTDFTLSINSVESEDIADYYCQQNNNWPTTFGAGTKLELKR

SEQ ID NO: 398 - protein, 244 aa, Artificial Sequence
  Description of Artificial Sequence: Synthetic polypeptide
QVQLKQSGPGLVQPSQSLSITCTVSGFSLTNYGVHWVRQSPGKGLEWLGVIWSGGNTDYNTPFTSRLSINKDNSKSQVFFKMNSLQSNDTAIYYCARALTYYDYEFAYWGQGTLVTVSAASTKGPEVQLVESGGGLVQPGGSLRLSCAASGFTFSIYSMNWVRQAPGKGLEWVSYISSSSSTIYYADSVKGRFTISRDNAKNSLYLQMNSLRDEDTAVYYCARDRGDFDAFDIWGQGTMVTVSS

SEQ ID NO: 399 - protein, 221 aa, Artificial Sequence
  Description of Artificial Sequence: Synthetic polypeptide
DILLTQSPVILSVSPGERVSFSCRASQSIGTNIHWYQQRTNGSPRLLIKYASESISGIPSRFSGSGSGTDFTLSINSVESEDIADYYCQQNNNWPTTFGAGTKLELKRTVAAPDIQMTQSPSSLSASVGDRVTITCQASQDITNYLNWYQQKPGKAPKLLIYDASNLETGVPSRFSGSGSGTDFTFTISSLQPEDIATYNCQQCENFPITFGQGTRLEIKR

SEQ ID NO: 400 - protein, 251 aa, Artificial Sequence
  Description of Artificial Sequence: Synthetic polypeptide
EVQLVESGGGLVQPGGSLRLSCAASGFTFSIYSMNWVRQAPGKGLEWVSYISSSSSTIYYADSVKGRFTISRDNAKNSLYLQMNSLRDEDTAVYYCARDRGDFDAFDIWGQGTMVTVSSASTKGPSVFPLAPQVQLKQSGPGLVQPSQSLSITCTVSGFSLTNYGVHWVRQSPGKGLEWLGVIWSGGNTDYNTPFTSRLSINKDNSKSQVFFKMNSLQSNDTAIYYCARALTYYDYEFAYWGQGTLVTVSA

SEQ ID NO: 401 - protein, 228 aa, Artificial Sequence
  Description of Artificial Sequence: Synthetic polypeptide
DIQMTQSPSSLSASVGDRVTITCQASQDITNYLNWYQQKPGKAPKLLIYDASNLETGVPSRFSGSGSGTDFTFTISSLQPEDIATYNCQQCENFPITFGQGTRLEIKRTVAAPSVFIFPPDILLTQSPVILSVSPGERVSFSCRASQSIGTNIHWYQQRTNGSPRLLIKYASESISGIPSRFSGSGSGTDFTLSINSVESEDIADYYCQQNNNWPTTFGAGTKLELKR

SEQ ID NO: 402 - protein, 251 aa, Artificial Sequence
  Description of Artificial Sequence: Synthetic polypeptide
QVQLKQSGPGLVQPSQSLSITCTVSGFSLTNYGVHWVRQSPGKGLEWLGVIWSGGNTDYNTPFTSRLSINKDNSKSQVFFKMNSLQSNDTAIYYCARALTYYDYEFAYWGQGTLVTVSAASTKGPSVFPLAPEVQLVESGGGLVQPGGSLRLSCAASGFTFSIYSMNWVRQAPGKGLEWVSYISSSSSTIYYADSVKGRFTISRDNAKNSLYLQMNSLRDEDTAVYYCARDRGDFDAFDIWGQGTMVTVSS

SEQ ID NO: 403 - protein, 228 aa, Artificial Sequence
  Description of Artificial Sequence: Synthetic polypeptide
DILLTQSPVILSVSPGERVSFSCRASQSIGTNIHWYQQRTNGSPRLLIKYASESISGIPSRFSGSGSGTDFTLSINSVESEDIADYYCQQNNNWPTTFGAGTKLELKRTVAAPSVFIFPPDIQMTQSPSSLSASVGDRVTITCQASQDITNYLNWYQQKPGKAPKLLIYDASNLETGVPSRFSGSGSGTDFTFTISSLQPEDIATYNCQQCENFPITFGQGTRLEIKR

SEQ ID NO: 404 - protein, 251 aa, Artificial Sequence; identical to SEQ ID NO: 400
  Description of Artificial Sequence: Synthetic polypeptide

SEQ ID NO: 405 - protein, 221 aa, Artificial Sequence; identical to SEQ ID NO: 397
  Description of Artificial Sequence: Synthetic polypeptide

SEQ ID NO: 406 - protein, 251 aa, Artificial Sequence; identical to SEQ ID NO: 402
  Description of Artificial Sequence: Synthetic polypeptide

SEQ ID NO: 407 - protein, 221 aa, Artificial Sequence; identical to SEQ ID NO: 399
  Description of Artificial Sequence: Synthetic polypeptide

SEQ ID NO: 408 - protein, 244 aa, Artificial Sequence; identical to SEQ ID NO: 396
  Description of Artificial Sequence: Synthetic polypeptide

SEQ ID NO: 409 - protein, 228 aa, Artificial Sequence; identical to SEQ ID NO: 401
  Description of Artificial Sequence: Synthetic polypeptide

SEQ ID NO: 410 - protein, 244 aa, Artificial Sequence; identical to SEQ ID NO: 398
  Description of Artificial Sequence: Synthetic polypeptide

SEQ ID NO: 411 - protein, 228 aa, Artificial Sequence; identical to SEQ ID NO: 403
  Description of Artificial Sequence: Synthetic polypeptide

SEQ ID NO: 412 - protein, 244 aa, Artificial Sequence
  Description of Artificial Sequence: Synthetic polypeptide
EVQLVESGGGLVQPGGSLRLSCAASGFTFSIYSMNWVRQAPGKGLEWVSYISSSSSTIYYADSVKGRFTISRDNAKNSLYLQMNSLRDEDTAVYYCARDRGDFDAFDIWGQGTMVTVSSASTKGPQVQLQESGPGLVKPSETLSLTCTVSGGSVSSGDYYWTWIRQSPGKGLEWIGHIYYSGNTNYNPSLKSRLTISIDTSKTQFSLKLSSVTAADTAIYYCVRDRVTGAFDIWGQGTMVTVSS

SEQ ID NO: 413 - protein, 221 aa, Artificial Sequence
  Description of Artificial Sequence: Synthetic polypeptide
DIQMTQSPSSLSASVGDRVTITCQASQDITNYLNWYQQKPGKAPKLLIYDASNLETGVPSRFSGSGSGTDFTFTISSLQPEDIATYNCQQCENFPITFGQGTRLEIKRTVAAPDIQMTQSPSSLSASVGDRVTITCQASQDISNYLNWYQQKPGKAPKLLIYDASNLETGVPSRFSGSGSGTDFTFTISSLQPEDIATYFCQHFDHLPLAFGGGTKVEIKR

SEQ ID NO: 414 - protein, 244 aa, Artificial Sequence
  Description of Artificial Sequence: Synthetic polypeptide
QVQLQESGPGLVKPSETLSLTCTVSGGSVSSGDYYWTWIRQSPGKGLEWIGHIYYSGNTNYNPSLKSRLTISIDTSKTQFSLKLSSVTAADTAIYYCVRDRVTGAFDIWGQGTMVTVSSASTKGPEVQLVESGGGLVQPGGSLRLSCAASGFTFSIYSMNWVRQAPGKGLEWVSYISSSSSTIYYADSVKGRFTISRDNAKNSLYLQMNSLRDEDTAVYYCARDRGDFDAFDIWGQGTMVTVSS

SEQ ID NO: 415 - protein, 221 aa, Artificial Sequence
  Description of Artificial Sequence: Synthetic polypeptide
DIQMTQSPSSLSASVGDRVTITCQASQDISNYLNWYQQKPGKAPKLLIYDASNLETGVPSRFSGSGSGTDFTFTISSLQPEDIATYFCQHFDHLPLAFGGGTKVEIKRTVAAPDIQMTQSPSSLSASVGDRVTITCQASQDITNYLNWYQQKPGKAPKLLIYDASNLETGVPSRFSGSGSGTDFTFTISSLQPEDIATYNCQQCENFPITFGQGTRLEIKR

SEQ ID NO: 416 - protein, 247 aa, Artificial Sequence
  Description of Artificial Sequence: Synthetic polypeptide
EVQLVESGGGLVQPGGSLRLSCAASGFTFSIYSMNWVRQAPGKGLEWVSYISSSSSTIYYADSVKGRFTISRDNAKNSLYLQMNSLRDEDTAVYYCARDRGDFDAFDIWGQGTMVTVSSASTKGPQVQLVESGGGLVKPGGSLRLSCAASGFTFSDYYMSWIRQAPGKGLEWVSYISSSGSTIYYADSVKGRFTISRDNAKNSLYLQMNSLRAEDTAVYYCARDEYNSGWYVLFDYWGQGTLVTVSS

SEQ ID NO: 417 - protein, 221 aa, Artificial Sequence
  Description of Artificial Sequence: Synthetic polypeptide
DIQMTQSPSSLSASVGDRVTITCQASQDITNYLNWYQQKPGKAPKLLIYDASNLETGVPSRFSGSGSGTDFTFTISSLQPEDIATYNCQQCENFPITFGQGTRLEIKRTVAAPDIQMTQSPSSVSASVGDRVTITCRASQGISSWLAWYQQKPGKAPNLLIYEASSLQSGVPSRFGGSGSGTDFTLTISSLQPEDFATYYCQQANGFPWTFGQGTKVEIKR

SEQ ID NO: 418 - protein, 247 aa, Artificial Sequence
  Description of Artificial Sequence: Synthetic polypeptide
QVQLVESGGGLVKPGGSLRLSCAASGFTFSDYYMSWIRQAPGKGLEWVSYISSSGSTIYYADSVKGRFTISRDNAKNSLYLQMNSLRAEDTAVYYCARDEYNSGWYVLFDYWGQGTLVTVSSASTKGPEVQLVESGGGLVQPGGSLRLSCAASGFTFSIYSMNWVRQAPGKGLEWVSYISSSSSTIYYADSVKGRFTISRDNAKNSLYLQMNSLRDEDTAVYYCARDRGDFDAFDIWGQGTMVTVSS

SEQ ID NO: 419 - protein, 221 aa, Artificial Sequence
  Description of Artificial Sequence: Synthetic polypeptide
DIQMTQSPSSVSASVGDRVTITCRASQGISSWLAWYQQKPGKAPNLLIYEASSLQSGVPSRFGGSGSGTDFTLTISSLQPEDFATYYCQQANGFPWTFGQGTKVEIKRTVAAPDIQMTQSPSSLSASVGDRVTITCQASQDITNYLNWYQQKPGKAPKLLIYDASNLETGVPSRFSGSGSGTDFTFTISSLQPEDIATYNCQQCENFPITFGQGTRLEIKR

SEQ ID NO: 420 - protein, 248 aa, Artificial Sequence
  Description of Artificial Sequence: Synthetic polypeptide
QVQLVQSGAEVKKPGASVKISCKASGYSFTAYYIHWVKQAPGQGLEWIGYISSYNGATNYNQKFKGRVTFTTDTSTSTAYMELRSLRSDDTAVYYCARDYDYDVGMDYWGQGTLVTVSSASTKGPEVQLVESGGGLVQPGGSLRLSCAASGYTFTNYGMNWVRQAPGKGLEWVGWINTYTGEPTYAADFKRRFTFSLDTSKSTAYLQMNSLRAEDTAVYYCAKYPHYYGSSHWYFDVWGQGTLVTVSS

SEQ ID NO: 421 - protein, 225 aa, Artificial Sequence
  Description of Artificial Sequence: Synthetic polypeptide
DIVMTQSPDSLAVSLGERATISCRASESVDNYGISFMKWFQQKPGQPPKLLIYAASNQGSGVPDRFSGSGSGTDFTLTISSLQAEDVAVYYCQQSKEVPWTFGGGTKVEIKRTVAAPDIQMTQSPSSLSASVGDRVTITCSASQDISNYLNWYQQKPGKAPKVLIYFTSSLHSGVPSRFSGSGSGTDFTLTISSLQPEDFATYYCQQYSTVPWTFGQGTKVEIKR

SEQ ID NO: 422 - protein, 248 aa, Artificial Sequence
  Description of Artificial Sequence: Synthetic polypeptide
EVQLVESGGGLVQPGGSLRLSCAASGYTFTNYGMNWVRQAPGKGLEWVGWINTYTGEPTYAADFKRRFTFSLDTSKSTAYLQMNSLRAEDTAVYYCAKYPHYYGSSHWYFDVWGQGTLVTVSSASTKGPQVQLVQSGAEVKKPGASVKISCKASGYSFTAYYIHWVKQAPGQGLEWIGYISSYNGATNYNQKFKGRVTFTTDTSTSTAYMELRSLRSDDTAVYYCARDYDYDVGMDYWGQGTLVTVSS

SEQ ID NO: 423 - protein, 225 aa, Artificial Sequence
  Description of Artificial Sequence: Synthetic polypeptide
DIQMTQSPSSLSASVGDRVTITCSASQDISNYLNWYQQKPGKAPKVLIYFTSSLHSGVPSRFSGSGSGTDFTLTISSLQPEDFATYYCQQYSTVPWTFGQGTKVEIKRTVAAPDIVMTQSPDSLAVSLGERATISCRASESVDNYGISFMKWFQQKPGQPPKLLIYAASNQGSGVPDRFSGSGSGTDFTLTISSLQAEDVAVYYCQQSKEVPWTFGGGTKVEIKR

SEQ ID NO: 424 - protein, 255 aa, Artificial Sequence
  Description of Artificial Sequence: Synthetic polypeptide
QVQLVQSGAEVKKPGASVKISCKASGYSFTAYYIHWVKQAPGQGLEWIGYISSYNGATNYNQKFKGRVTFTTDTSTSTAYMELRSLRSDDTAVYYCARDYDYDVGMDYWGQGTLVTVSSASTKGPSVFPLAPEVQLVESGGGLVQPGGSLRLSCAASGYTFTNYGMNWVRQAPGKGLEWVGWINTYTGEPTYAADFKRRFTFSLDTSKSTAYLQMNSLRAEDTAVYYCAKYPHYYGSSHWYFDVWGQGTLVTVSS

SEQ ID NO: 425 - protein, 232 aa, Artificial Sequence
  Description of Artificial Sequence: Synthetic polypeptide
DIVMTQSPDSLAVSLGERATISCRASESVDNYGISFMKWFQQKPGQPPKLLIYAASNQGSGVPDRFSGSGSGTDFTLTISSLQAEDVAVYYCQQSKEVPWTFGGGTKVEIKRTVAAPSVFIFPPDIQMTQSPSSLSASVGDRVTITCSASQDISNYLNWYQQKPGKAPKVLIYFTSSLHSGVPSRFSGSGSGTDFTLTISSLQPEDFATYYCQQYSTVPWTFGQGTKVEIKR

SEQ ID NO: 426 - protein, 255 aa, Artificial Sequence
  Description of Artificial Sequence: Synthetic polypeptide
EVQLVESGGGLVQPGGSLRLSCAASGYTFTNYGMNWVRQAPGKGLEWVGWINTYTGEPTYAADFKRRFTFSLDTSKSTAYLQMNSLRAEDTAVYYCAKYPHYYGSSHWYFDVWGQGTLVTVSSASTKGPSVFPLAPQVQLVQSGAEVKKPGASVKISCKASGYSFTAYYIHWVKQAPGQGLEWIGYISSYNGATNYNQKFKGRVTFTTDTSTSTAYMELRSLRSDDTAVYYCARDYDYDVGMDYWGQGTLVTVSS

SEQ ID NO: 427 - protein, 232 aa, Artificial Sequence
  Description of Artificial Sequence: Synthetic polypeptide
DIQMTQSPSSLSASVGDRVTITCSASQDISNYLNWYQQKPGKAPKVLIYFTSSLHSGVPSRFSGSGSGTDFTLTISSLQPEDFATYYCQQYSTVPWTFGQGTKVEIKRTVAAPSVFIFPPDIVMTQSPDSLAVSLGERATISCRASESVDNYGISFMKWFQQKPGQPPKLLIYAASNQGSGVPDRFSGSGSGTDFTLTISSLQAEDVAVYYCQQSKEVPWTFGGGTKVEIKR

SEQ ID NO: 428 - protein, 255 aa, Artificial Sequence; identical to SEQ ID NO: 424
  Description of Artificial Sequence: Synthetic polypeptide

SEQ ID NO: 429 - protein, 225 aa, Artificial Sequence; identical to SEQ ID NO: 421
  Description of Artificial Sequence: Synthetic polypeptide

SEQ ID NO: 430 - protein, 255 aa, Artificial Sequence; identical to SEQ ID NO: 426
  Description of Artificial Sequence: Synthetic polypeptide

SEQ ID NO: 431 - protein, 225 aa, Artificial Sequence; identical to SEQ ID NO: 423
  Description of Artificial Sequence: Synthetic polypeptide

SEQ ID NO: 432 - protein, 248 aa, Artificial Sequence; identical to SEQ ID NO: 420
  Description of Artificial Sequence: Synthetic polypeptide

SEQ ID NO: 433 - protein, 232 aa, Artificial Sequence; identical to SEQ ID NO: 425
  Description of Artificial Sequence: Synthetic polypeptide

SEQ ID NO: 434 - protein, 248 aa, Artificial Sequence; identical to SEQ ID NO: 422
  Description of Artificial Sequence: Synthetic polypeptide

SEQ ID NO: 435 - protein, 232 aa, Artificial Sequence; identical to SEQ ID NO: 427
  Description of Artificial Sequence: Synthetic polypeptide

SEQ ID NO: 436 - protein, 245 aa, Artificial Sequence
  Description of Artificial Sequence: Synthetic polypeptide
QVQLVQSGAEVKKPGASVKISCKASGYSFTAYYIHWVKQAPGQGLEWIGYISSYNGATNYNQKFKGRVTFTTDTSTSTAYMELRSLRSDDTAVYYCARDYDYDVGMDYWGQGTLVTVSSASTKGPEVQLVESGGGLVQPGGSLRLSCAASGFTISDYWIHWVRQAPGKGLEWVAGITPAGGYTYYADSVKGRFTISADTSKNTAYLQMNSLRAEDTAVYYCARFVFFLPYAMDYWGQGTLVTVSS

SEQ ID NO: 437 - protein, 225 aa, Artificial Sequence
  Description of Artificial Sequence: Synthetic polypeptide
DIVMTQSPDSLAVSLGERATISCRASESVDNYGISFMKWFQQKPGQPPKLLIYAASNQGSGVPDRFSGSGSGTDFTLTISSLQAEDVAVYYCQQSKEVPWTFGGGTKVEIKRTVAAPDIQMTQSPSSLSASVGDRVTITCRASQDVSTAVAWYQQKPGKAPKLLIYSASFLYSGVPSRFSGSGSGTDFTLTISSLQPEDFATYYCQQSYTTPPTFGQGTKVEIKR

SEQ ID NO: 438 - protein, 245 aa, Artificial Sequence
  Description of Artificial Sequence: Synthetic polypeptide
EVQLVESGGGLVQPGGSLRLSCAASGFTISDYWIHWVRQAPGKGLEWVAGITPAGGYTYYADSVKGRFTISADTSKNTAYLQMNSLRAEDTAVYYCARFVFFLPYAMDYWGQGTLVTVSSASTKGPQVQLVQSGAEVKKPGASVKISCKASGYSFTAYYIHWVKQAPGQGLEWIGYISSYNGATNYNQKFKGRVTFTTDTSTSTAYMELRSLRSDDTAVYYCARDYDYDVGMDYWGQGTLVTVSS

SEQ ID NO: 439 - protein, 225 aa, Artificial Sequence
  Description of Artificial Sequence: Synthetic polypeptide
DIQMTQSPSSLSASVGDRVTITCRASQDVSTAVAWYQQKPGKAPKLLIYSASFLYSGVPSRFSGSGSGTDFTLTISSLQPEDFATYYCQQSYTTPPTFGQGTKVEIKRTVAAPDIVMTQSPDSLAVSLGERATISCRASESVDNYGISFMKWFQQKPGQPPKLLIYAASNQGSGVPDRFSGSGSGTDFTLTISSLQAEDVAVYYCQQSKEVPWTFGGGTKVEIKR

SEQ ID NO: 440 - protein, 252 aa, Artificial Sequence
  Description of Artificial Sequence: Synthetic polypeptide
QVQLVQSGAEVKKPGASVKISCKASGYSFTAYYIHWVKQAPGQGLEWIGYISSYNGATNYNQKFKGRVTFTTDTSTSTAYMELRSLRSDDTAVYYCARDYDYDVGMDYWGQGTLVTVSSASTKGPSVFPLAPEVQLVESGGGLVQPGGSLRLSCAASGFTISDYWIHWVRQAPGKGLEWVAGITPAGGYTYYADSVKGRFTISADTSKNTAYLQMNSLRAEDTAVYYCARFVFFLPYAMDYWGQGTLVTVSS

SEQ ID NO: 441 - protein, 232 aa, Artificial Sequence
  Description of Artificial Sequence: Synthetic polypeptide
DIVMTQSPDSLAVSLGERATISCRASESVDNYGISFMKWFQQKPGQPPKLLIYAASNQGSGVPDRFSGSGSGTDFTLTISSLQAEDVAVYYCQQSKEVPWTFGGGTKVEIKRTVAAPSVFIFPPDIQMTQSPSSLSASVGDRVTITCRASQDVSTAVAWYQQKPGKAPKLLIYSASFLYSGVPSRFSGSGSGTDFTLTISSLQPEDFATYYCQQSYTTPPTFGQGTKVEIKR

SEQ ID NO: 442 - protein, 252 aa, Artificial Sequence
  Description of Artificial Sequence: Synthetic polypeptide
EVQLVESGGGLVQPGGSLRLSCAASGFTISDYWIHWVRQAPGKGLEWVAGITPAGGYTYYADSVKGRFTISADTSKNTAYLQMNSLRAEDTAVYYCARFVFFLPYAMDYWGQGTLVTVSSASTKGPSVFPLAPQVQLVQSGAEVKKPGASVKISCKASGYSFTAYYIHWVKQAPGQGLEWIGYISSYNGATNYNQKFKGRVTFTTDTSTSTAYMELRSLRSDDTAVYYCARDYDYDVGMDYWGQGTLVTVSS

SEQ ID NO: 443 - protein, 232 aa, Artificial Sequence
  Description of Artificial Sequence: Synthetic polypeptide
DIQMTQSPSSLSASVGDRVTITCRASQDVSTAVAWYQQKPGKAPKLLIYSASFLYSGVPSRFSGSGSGTDFTLTISSLQPEDFATYYCQQSYTTPPTFGQGTKVEIKRTVAAPSVFIFPPDIVMTQSPDSLAVSLGERATISCRASESVDNYGISFMKWFQQKPGQPPKLLIYAASNQGSGVPDRFSGSGSGTDFTLTISSLQAEDVAVYYCQQSKEVPWTFGGGTKVEIKR

SEQ ID NO: 444 - protein, 252 aa, Artificial Sequence; identical to SEQ ID NO: 440
  Description of Artificial Sequence: Synthetic polypeptide

SEQ ID NO: 445 - protein, 225 aa, Artificial Sequence; identical to SEQ ID NO: 437
  Description of Artificial Sequence: Synthetic polypeptide

SEQ ID NO: 446 - protein, 252 aa, Artificial Sequence; identical to SEQ ID NO: 442
  Description of Artificial Sequence: Synthetic polypeptide

SEQ ID NO: 447 - protein, 225 aa, Artificial Sequence; identical to SEQ ID NO: 439
  Description of Artificial Sequence: Synthetic polypeptide

SEQ ID NO: 448 - protein, 245 aa, Artificial Sequence; identical to SEQ ID NO: 436
  Description of Artificial Sequence: Synthetic polypeptide

SEQ ID NO: 449 - protein, 232 aa, Artificial Sequence; identical to SEQ ID NO: 441
  Description of Artificial Sequence: Synthetic polypeptide

SEQ ID NO: 450 - protein, 245 aa, Artificial Sequence; identical to SEQ ID NO: 438
  Description of Artificial Sequence: Synthetic polypeptide

SEQ ID NO: 451 - protein, 232 aa, Artificial Sequence; identical to SEQ ID NO: 443
  Description of Artificial Sequence: Synthetic polypeptide

SEQ ID NO: 452 - protein, 246 aa, Artificial Sequence
  Description of Artificial Sequence: Synthetic polypeptide
QVQLVQSGAEVKKPGASVKISCKASGYSFTAYYIHWVKQAPGQGLEWIGYISSYNGATNYNQKFKGRVTFTTDTSTSTAYMELRSLRSDDTAVYYCARDYDYDVGMDYWGQGTLVTVSSASTKGPEVQLVESGGGLVQPGGSLRLSCAASGFTINASWIHWVRQAPGKGLEWVGAIYPYSGYTNYADSVKGRFTISADTSKNTAYLQMNSLRAEDTAVYYCARWGHSTSPWAMDYWGQGTLVTVSS

SEQ ID NO: 453 - protein, 225 aa, Artificial Sequence
  Description of Artificial Sequence: Synthetic polypeptide
DIVMTQSPDSLAVSLGERATISCRASESVDNYGISFMKWFQQKPGQPPKLLIYAASNQGSGVPDRFSGSGSGTDFTLTISSLQAEDVAVYYCQQSKEVPWTFGGGTKVEIKRTVAAPDIQMTQSPSSLSASVGDRVTITCRASQVIRRSLAWYQQKPGKAPKLLIYAASNLASGVPSRFSGSGSGTDFTLTISSLQPEDFATYYCQQSNTSPLTFGQGTKVEIKR

SEQ ID NO: 454 - protein, 246 aa, Artificial Sequence
  Description of Artificial Sequence: Synthetic polypeptide
EVQLVESGGGLVQPGGSLRLSCAASGFTINASWIHWVRQAPGKGLEWVGAIYPYSGYTNYADSVKGRFTISADTSKNTAYLQMNSLRAEDTAVYYCARWGHSTSPWAMDYWGQGTLVTVSSASTKGPQVQLVQSGAEVKKPGASVKISCKASGYSFTAYYIHWVKQAPGQGLEWIGYISSYNGATNYNQKFKGRVTFTTDTSTSTAYMELRSLRSDDTAVYYCARDYDYDVGMDYWGQGTLVTVSS

SEQ ID NO: 455 - protein, 225 aa, Artificial Sequence
  Description of Artificial Sequence: Synthetic polypeptide
DIQMTQSPSSLSASVGDRVTITCRASQVIRRSLAWYQQKPGKAPKLLIYAASNLASGVPSRFSGSGSGTDFTLTISSLQPEDFATYYCQQSNTSPLTFGQGTKVEIKRTVAAPDIVMTQSPDSLAVSLGERATISCRASESVDNYGISFMKWFQQKPGQPPKLLIYAASNQGSGVPDRFSGSGSGTDFTLTISSLQAEDVAVYYCQQSKEVPWTFGGGTKVEIKR

SEQ ID NO: 456 - protein, 253 aa, Artificial Sequence
  Description of Artificial Sequence: Synthetic polypeptide
QVQLVQSGAEVKKPGASVKISCKASGYSFTAYYIHWVKQAPGQGLEWIGYISSYNGATNYNQKFKGRVTFTTDTSTSTAYMELRSLRSDDTAVYYCARDYDYDVGMDYWGQGTLVTVSSASTKGPSVFPLAPEVQLVESGGGLVQPGGSLRLSCAASGFTINASWIHWVRQAPGKGLEWVGAIYPYSGYTNYADSVKGRFTISADTSKNTAYLQMNSLRAEDTAVYYCARWGHSTSPWAMDYWGQGTLVTVSS

SEQ ID NO: 457 - protein, 232 aa, Artificial Sequence
  Description of Artificial Sequence: Synthetic polypeptide
DIVMTQSPDSLAVSLGERATISCRASESVDNYGISFMKWFQQKPGQPPKLLIYAASNQGSGVPDRFSGSGSGTDFTLTISSLQAEDVAVYYCQQSKEVPWTFGGGTKVEIKRTVAAPSVFIFPPDIQMTQSPSSLSASVGDRVTITCRASQVIRRSLAWYQQKPGKAPKLLIYAASNLASGVPSRFSGSGSGTDFTLTISSLQPEDFATYYCQQSNTSPLTFGQGTKVEIKR

SEQ ID NO: 458 - protein, 253 aa, Artificial Sequence
  Description of Artificial Sequence: Synthetic polypeptide
EVQLVESGGGLVQPGGSLRLSCAASGFTINASWIHWVRQAPGKGLEWVGAIYPYSGYTNYADSVKGRFTISADTSKNTAYLQMNSLRAEDTAVYYCARWGHSTSPWAMDYWGQGTLVTVSSASTKGPSVFPLAPQVQLVQSGAEVKKPGASVKISCKASGYSFTAYYIHWVKQAPGQGLEWIGYISSYNGATNYNQKFKGRVTFTTDTSTSTAYMELRSLRSDDTAVYYCARDYDYDVGMDYWGQGTLVTVSS

SEQ ID NO: 459 - protein, 232 aa, Artificial Sequence
  Description of Artificial Sequence: Synthetic polypeptide
DIQMTQSPSSLSASVGDRVTITCRASQVIRRSLAWYQQKPGKAPKLLIYAASNLASGVPSRFSGSGSGTDFTLTISSLQPEDFATYYCQQSNTSPLTFGQGTKVEIKRTVAAPSVFIFPPDIVMTQSPDSLAVSLGERATISCRASESVDNYGISFMKWFQQKPGQPPKLLIYAASNQGSGVPDRFSGSGSGTDFTLTISSLQAEDVAVYYCQQSKEVPWTFGGGTKVEIKR

SEQ ID NO: 460 - protein, 253 aa, Artificial Sequence; identical to SEQ ID NO: 456
  Description of Artificial Sequence: Synthetic polypeptide

SEQ ID NO: 461 - protein, 225 aa, Artificial Sequence; identical to SEQ ID NO: 453
  Description of Artificial Sequence: Synthetic polypeptide

SEQ ID NO: 462 - protein, 253 aa, Artificial Sequence; identical to SEQ ID NO: 458
  Description of Artificial Sequence: Synthetic polypeptide

SEQ ID NO: 463 - protein, 225 aa, Artificial Sequence; identical to SEQ ID NO: 455
  Description of Artificial Sequence: Synthetic polypeptide

SEQ ID NO: 464 - protein, 246 aa, Artificial Sequence; identical to SEQ ID NO: 452
  Description of Artificial Sequence: Synthetic polypeptide

SEQ ID NO: 465 - protein, 232 aa, Artificial Sequence; identical to SEQ ID NO: 457
  Description of Artificial Sequence: Synthetic polypeptide

SEQ ID NO: 466 - protein, 246 aa, Artificial Sequence; identical to SEQ ID NO: 454
  Description of Artificial Sequence: Synthetic polypeptide

SEQ ID NO: 467 - protein, 232 aa, Artificial Sequence; identical to SEQ ID NO: 459
  Description of Artificial Sequence: Synthetic polypeptide

SEQ ID NO: 468 - protein, 244 aa, Artificial Sequence
  Description of Artificial Sequence: Synthetic polypeptide
EVQLVESGGGLVQPGGSLRLSCAASGFTFTDNWISWVRQAPGKGLEWVGYISPNSGFTYYADSVKGRFTISADTSKNTAYLQMNSLRAEDTAVYYCARDNFGGYFDYWGQGTLVTVSSASTKGPEVQLVESGGGLVQPGGSLRLSCAASGFTISDYWIHWVRQAPGKGLEWVAGITPAGGYTYYADSVKGRFTISADTSKNTAYLQMNSLRAEDTAVYYCARFVFFLPYAMDYWGQGTLVTVSS

SEQ ID NO: 469 - protein, 222 aa, Artificial Sequence
  Description of Artificial Sequence: Synthetic polypeptide
DIQMTQSPSSLSASVGDRVTITCRASQDVSTAVAWYQQKPGKAPKLLIYSASFLYSGVPSRFSGSGSGTDFTLTISSLQPEDFATTYYCQQSYTGTVTFGQGTKVEIKRTVAAPDIQMTQSPSSLSASVGDRVTITCRASQDVSTAVAWYQQKPGKAPKLLIYSASFLYSGVPSRFSGSGSGTDFTLTISSLQPEDFATYYCQQSYTTPPTFGQGTKVEIKR

SEQ ID NO: 470 - protein, 244 aa, Artificial Sequence
  Description of Artificial Sequence: Synthetic polypeptide
EVQLVESGGGLVQPGGSLRLSCAASGFTISDYWIHWVRQAPGKGLEWVAGITPAGGYTYYADSVKGRFTISADTSKNTAYLQMNSLRAEDTAVYYCARFVFFLPYAMDYWGQGTLVTVSSASTKGPEVQLVESGGGLVQPGGSLRLSCAASGFTFTDNWISWVRQAPGKGLEWVGYISPNSGFTYYADSVKGRFTISADTSKNTAYLQMNSLRAEDTAVYYCARDNFGGYFDYWGQGTLVTVSS

SEQ ID NO: 471 - protein, 222 aa, Artificial Sequence
  Description of Artificial Sequence: Synthetic polypeptide
DIQMTQSPSSLSASVGDRVTITCRASQDVSTAVAWYQQKPGKAPKLLIYSASFLYSGVPSRFSGSGSGTDFTLTISSLQPEDFATYYCQQSYTTPPTFGQGTKVEIKRTVAAPDIQMTQSPSSLSASVGDRVTITCRASQDVSTAVAWYQQKPGKAPKLLIYSASFLYSGVPSRFSGSGSGTDFTLTISSLQPEDFATTYYCQQSYTGTVTFGQGTKVEIKR

SEQ ID NO: 472 - protein, 251 aa, Artificial Sequence
  Description of Artificial Sequence: Synthetic polypeptide
EVQLVESGGGLVQPGGSLRLSCAASGFTFTDNWISWVRQAPGKGLEWVGYISPNSGFTYYADSVKGRFTISADTSKNTAYLQMNSLRAEDTAVYYCARDNFGGYFDYWGQGTLVTVSSASTKGPSVFPLAPEVQLVESGGGLVQPGGSLRLSCAASGFTISDYWIHWVRQAPGKGLEWVAGITPAGGYTYYADSVKGRFTISADTSKNTAYLQMNSLRAEDTAVYYCARFVFFLPYAMDYWGQGTLVTVSS

SEQ ID NO: 473 - protein, 229 aa, Artificial Sequence
  Description of Artificial Sequence: Synthetic polypeptide
DIQMTQSPSSLSASVGDRVTITCRASQDVSTAVAWYQQKPGKAPKLLIYSASFLYSGVPSRFSGSGSGTDFTLTISSLQPEDFATTYYCQQSYTGTVTFGQGTKVEIKRTVAAPSVFIFPPDIQMTQSPSSLSASVGDRVTITCRASQDVSTAVAWYQQKPGKAPKLLIYSASFLYSGVPSRFSGSGSGTDFTLTISSLQPEDFATYYCQQSYTTPPTFGQGTKVEIKR

SEQ ID NO: 474 - protein, 251 aa, Artificial Sequence
  Description of Artificial Sequence: Synthetic polypeptide
EVQLVESGGGLVQPGGSLRLSCAASGFTISDYWIHWVRQAPGKGLEWVAGITPAGGYTYYADSVKGRFTISADTSKNTAYLQMNSLRAEDTAVYYCARFVFFLPYAMDYWGQGTLVTVSSASTKGPSVFPLAPEVQLVESGGGLVQPGGSLRLSCAASGFTFTDNWISWVRQAPGKGLEWVGYISPNSGFTYYADSVKGRFTISADTSKNTAYLQMNSLRAEDTAVYYCARDNFGGYFDYWGQGTLVTVSS

SEQ ID NO: 475 - protein, 229 aa, Artificial Sequence
  Description of Artificial Sequence: Synthetic polypeptide
DIQMTQSPSSLSASVGDRVTITCRASQDVSTAVAWYQQKPGKAPKLLIYSASFLYSGVPSRFSGSGSGTDFTLTISSLQPEDFATYYCQQSYTTPPTFGQGTKVEIKRTVAAPSVFIFPPDIQMTQSPSSLSASVGDRVTITCRASQDVSTAVAWYQQKPGKAPKLLIYSASFLYSGVPSRFSGSGSGTDFTLTISSLQPEDFATTYYCQQSYTGTVTFGQGTKVEIKR

SEQ ID NO: 476 - protein, 251 aa, Artificial Sequence; identical to SEQ ID NO: 472
  Description of Artificial Sequence: Synthetic polypeptide

SEQ ID NO: 477 - protein, 222 aa, Artificial Sequence; identical to SEQ ID NO: 469
  Description of Artificial Sequence: Synthetic polypeptide

SEQ ID NO: 478 - protein, 251 aa, Artificial Sequence; identical to SEQ ID NO: 474
  Description of Artificial Sequence: Synthetic polypeptide

SEQ ID NO: 479 - protein, 222 aa, Artificial Sequence; identical to SEQ ID NO: 471
  Description of Artificial Sequence: Synthetic polypeptide

SEQ ID NO: 480 - protein, 244 aa, Artificial Sequence; identical to SEQ ID NO: 468
  Description of Artificial Sequence: Synthetic polypeptide

SEQ ID NO: 481 - protein, 229 aa, Artificial Sequence; identical to SEQ ID NO: 473
  Description of Artificial Sequence: Synthetic polypeptide

SEQ ID NO: 482 - protein, 244 aa, Artificial Sequence; identical to SEQ ID NO: 470
  Description of Artificial Sequence: Synthetic polypeptide

SEQ ID NO: 483 - protein, 229 aa, Artificial Sequence; identical to SEQ ID NO: 475
  Description of Artificial Sequence: Synthetic polypeptide

SEQ ID NO: 484 - protein, 245 aa, Artificial Sequence
  Description of Artificial Sequence: Synthetic polypeptide
EVQLVESGGGLVQPGGSLRLSCAASGFTFTDNWISWVRQAPGKGLEWVGYISPNSGFTYYADSVKGRFTISADTSKNTAYLQMNSLRAEDTAVYYCARDNFGGYFDYWGQGTLVTVSSASTKGPEVQLVESGGGLVQPGGSLRLSCAASGFTINASWIHWVRQAPGKGLEWVGAIYPYSGYTNYADSVKGRFTISADTSKNTAYLQMNSLRAEDTAVYYCARWGHSTSPWAMDYWGQGTLVTVSS

SEQ ID NO: 485 - protein, 222 aa, Artificial Sequence
  Description of Artificial Sequence: Synthetic polypeptide
DIQMTQSPSSLSASVGDRVTITCRASQDVSTAVAWYQQKPGKAPKLLIYSASFLYSGVPSRFSGSGSGTDFTLTISSLQPEDFATTYYCQQSYTGTVTFGQGTKVEIKRTVAAPDIQMTQSPSSLSASVGDRVTITCRASQVIRRSLAWYQQKPGKAPKLLIYAASNLASGVPSRFSGSGSGTDFTLTISSLQPEDFATYYCQQSNTSPLTFGQGTKVEIKR

SEQ ID NO: 486 - protein, 245 aa, Artificial Sequence
  Description of Artificial Sequence: Synthetic polypeptide
EVQLVESGGGLVQPGGSLRLSCAASGFTINASWIHWVRQAPGKGLEWVGAIYPYSGYTNYADSVKGRFTISADTSKNTAYLQMNSLRAEDTAVYYCARWGHSTSPWAMDYWGQGTLVTVSSASTKGPEVQLVESGGGLVQPGGSLRLSCAASGFTFTDNWISWVRQAPGKGLEWVGYISPNSGFTYYADSVKGRFTISADTSKNTAYLQMNSLRAEDTAVYYCARDNFGGYFDYWGQGTLVTVSS

SEQ ID NO: 487 - protein, 222 aa, Artificial Sequence
  Description of Artificial Sequence: Synthetic polypeptide
DIQMTQSPSSLSASVGDRVTITCRASQVIRRSLAWYQQKPGKAPKLLIYAASNLASGVPSRFSGSGSGTDFTLTISSLQPEDFATYYCQQSNTSPLTFGQGTKVEIKRTVAAPDIQMTQSPSSLSASVGDRVTITCRASQDVSTAVAWYQQKPGKAPKLLIYSASFLYSGVPSRFSGSGSGTDFTLTISSLQPEDFATTYYCQQSYTGTVTFGQGTKVEIKR

SEQ ID NO: 488 - protein, 252 aa, Artificial Sequence
  Description of Artificial Sequence: Synthetic polypeptide
EVQLVESGGGLVQPGGSLRLSCAASGFTFTDNWISWVRQAPGKGLEWVGYISPNSGFTYYADSVKGRFTISADTSKNTAYLQMNSLRAEDTAVYYCARDNFGGYFDYWGQGTLVTVSSASTKGPSVFPLAPEVQLVESGGGLVQPGGSLRLSCAASGFTINASWIHWVRQAPGKGLEWVGAIYPYSGYTNYADSVKGRFTISADTSKNTAYLQMNSLRAEDTAVYYCARWGHSTSPWAMDYWGQGTLVTVSS

SEQ ID NO: 489 - protein, 229 aa, Artificial Sequence
  Description of Artificial Sequence: Synthetic polypeptide
DIQMTQSPSSLSASVGDRVTITCRASQDVSTAVAWYQQKPGKAPKLLIYSASFLYSGVPSRFSGSGSGTDFTLTISSLQPEDFATTYYCQQSYTGTVTFGQGTKVEIKRTVAAPSVFIFPPDIQMTQSPSSLSASVGDRVTITCRASQVIRRSLAWYQQKPGKAPKLLIYAASNLASGVPSRFSGSGSGTDFTLTISSLQPEDFATYYCQQSNTSPLTFGQGTKVEIKR

SEQ ID NO: 490 - protein, 252 aa, Artificial Sequence
  Description of Artificial Sequence: Synthetic polypeptide
EVQLVESGGGLVQPGGSLRLSCAASGFTINASWIHWVRQAPGKGLEWVGAIYPYSGYTNYADSVKGRFTISADTSKNTAYLQMNSLRAEDTAVYYCARWGHSTSPWAMDYWGQGTLVTVSSASTKGPSVFPLAPEVQLVESGGGLVQPGGSLRLSCAASGFTFTDNWISWVRQAPGKGLEWVGYISPNSGFTYYADSVKGRFTISADTSKNTAYLQMNSLRAEDTAVYYCARDNFGGYFDYWGQGTLVTVSS

SEQ ID NO: 491 - protein, 229 aa, Artificial Sequence
  Description of Artificial Sequence: Synthetic polypeptide
DIQMTQSPSSLSASVGDRVTITCRASQVIRRSLAWYQQKPGKAPKLLIYAASNLASGVPSRFSGSGSGTDFTLTISSLQPEDFATYYCQQSNTSPLTFGQGTKVEIKRTVAAPSVFIFPPDIQMTQSPSSLSASVGDRVTITCRASQDVSTAVAWYQQKPGKAPKLLIYSASFLYSGVPSRFSGSGSGTDFTLTISSLQPEDFATTYYCQQSYTGTVTFGQGTKVEIKR

SEQ ID NO: 492 - protein, 252 aa, Artificial Sequence; identical to SEQ ID NO: 488
  Description of Artificial Sequence: Synthetic polypeptide

SEQ ID NO: 493 - protein, 222 aa, Artificial Sequence; identical to SEQ ID NO: 485
  Description of Artificial Sequence: Synthetic polypeptide

SEQ ID NO: 494 - protein, 252 aa, Artificial Sequence; identical to SEQ ID NO: 490
  Description of Artificial Sequence: Synthetic polypeptide

SEQ ID NO: 495 - protein, 222 aa, Artificial Sequence; identical to SEQ ID NO: 487
  Description of Artificial Sequence: Synthetic polypeptide

SEQ ID NO: 496 - protein, 245 aa, Artificial Sequence; identical to SEQ ID NO: 484
  Description of Artificial Sequence: Synthetic polypeptide

SEQ ID NO: 497 - protein, 229 aa, Artificial Sequence; identical to SEQ ID NO: 489
  Description of Artificial Sequence: Synthetic polypeptide

SEQ ID NO: 498 - protein, 245 aa, Artificial Sequence; identical to SEQ ID NO: 486
  Description of Artificial Sequence: Synthetic polypeptide

SEQ ID NO: 499 - protein, 229 aa, Artificial Sequence; identical to SEQ ID NO: 491
  Description of Artificial Sequence: Synthetic polypeptide

SEQ ID NO: 500 - protein, 254 aa, Artificial Sequence
  Description of Artificial Sequence: Synthetic polypeptide
EVQLVESGGGLVQPGGSLRLSCAASGFTFTDNWISWVRQAPGKGLEWVGYISPNSGFTYYADSVKGRFTISADTSKNTAYLQMNSLRAEDTAVYYCARDNFGGYFDYWGQGTLVTVSSASTKGPSVFPLAPEVQLVESGGGLVQPGGSLRLSCAASGYTFTNYGMNWVRQAPGKGLEWVGWINTYTGEPTYAADFKRRFTFSLDTSKSTAYLQMNSLRAEDTAVYYCAKYPHYYGSSHWYFDVWGQGTLVTVSS

SEQ ID NO: 501 - protein, 229 aa, Artificial Sequence
  Description of Artificial Sequence: Synthetic polypeptide
DIQMTQSPSSLSASVGDRVTITCRASQDVSTAVAWYQQKPGKAPKLLIYSASFLYSGVPSRFSGSGSGTDFTLTISSLQPEDFATTYYCQQSYTGTVTFGQGTKVEIKRTVAAPSVFIFPPDIQMTQSPSSLSASVGDRVTITCSASQDISNYLNWYQQKPGKAPKVLIYFTSSLHSGVPSRFSGSGSGTDFTLTISSLQPEDFATYYCQQYSTVPWTFGQGTKVEIKR

SEQ ID NO: 502 - protein, 254 aa, Artificial Sequence
  Description of Artificial Sequence: Synthetic polypeptide
EVQLVESGGGLVQPGGSLRLSCAASGYTFTNYGMNWVRQAPGKGLEWVGWINTYTGEPTYAADFKRRFTFSLDTSKSTAYLQMNSLRAEDTAVYYCAKYPHYYGSSHWYFDVWGQGTLVTVSSASTKGPSVFPLAPEVQLVESGGGLVQPGGSLRLSCAASGFTFTDNWISWVRQAPGKGLEWVGYISPNSGFTYYADSVKGRFTISADTSKNTAYLQMNSLRAEDTAVYYCARDNFGGYFDYWGQGTLVTVSS

SEQ ID NO: 503 - protein, 229 aa, Artificial Sequence
  Description of Artificial Sequence: Synthetic polypeptide
DIQMTQSPSSLSASVGDRVTITCSASQDISNYLNWYQQKPGKAPKVLIYFTSSLHSGVPSRFSGSGSGTDFTLTISSLQPEDFATYYCQQYSTVPWTFGQGTKVEIKRTVAAPSVFIFPPDIQMTQSPSSLSASVGDRVTITCRASQDVSTAVAWYQQKPGKAPKLLIYSASFLYSGVPSRFSGSGSGTDFTLTISSLQPEDFATTYYCQQSYTGTVTFGQGTKVEIKR

SEQ ID NO: 504 - protein, 254 aa, Artificial Sequence; identical to SEQ ID NO: 500
  Description of Artificial Sequence: Synthetic polypeptide

SEQ ID NO: 505 - protein, 222 aa, Artificial Sequence; identical to SEQ ID NO: 255
  Description of Artificial Sequence: Synthetic polypeptide

SEQ ID NO: 506 - protein, 254 aa, Artificial Sequence; identical to SEQ ID NO: 502
  Description of Artificial Sequence: Synthetic polypeptide

SEQ ID NO: 507 - protein, 222 aa, Artificial Sequence; identical to SEQ ID NO: 253
  Description of Artificial Sequence: Synthetic polypeptide

SEQ ID NO: 508 - protein, 247 aa, Artificial Sequence; identical to SEQ ID NO: 254
  Description of Artificial Sequence: Synthetic polypeptide

SEQ ID NO: 509 - protein, 229 aa, Artificial Sequence; identical to SEQ ID NO: 501
  Description of Artificial Sequence: Synthetic polypeptide

SEQ ID NO: 510 - protein, 247 aa, Artificial Sequence; identical to SEQ ID NO: 252
  Description of Artificial Sequence: Synthetic polypeptide

SEQ ID NO: 511 - protein, 229 aa, Artificial Sequence; identical to SEQ ID NO: 503
  Description of Artificial Sequence: Synthetic polypeptide

SEQ ID NO: 512 - protein, 249 aa, Artificial Sequence
  Description of Artificial Sequence: Synthetic polypeptide
EVQLQQSGPELVKPGASVKMSCKASGYTFTSYVINWVKQKPGQGLEWIGLINPYNDGTKYNEKFKVKATLTSDKSSSTAYMELSSLTSEDSAVYYCASYYYGSRYYFDYWGQGTTLTVSSASTKGPEVQLVESGGGLVQPGGSLRLSCAASGYTFTNYGMNWVRQAPGKGLEWVGWINTYTGEPTYAADFKRRFTFSLDTSKSTAYLQMNSLRAEDTAVYYCAKYPHYYGSSHWYFDVWGQGTLVTVSS

SEQ ID NO: 513 - protein, 221 aa, Artificial Sequence
  Description of Artificial Sequence: Synthetic polypeptide
DIQMTQSSSYLSVSLGGRVTITCKASDHINNWLAWYQQKPGNAPRLLISGATSLETGVPSRFSGSGSGKDYTLSITSLQTEDVATYYCQQYWSIPLTFGAGTKLELKRTVAAPDIQMTQSPSSLSASVGDRVTITCSASQDISNYLNWYQQKPGKAPKVLIYFTSSLHSGVPSRFSGSGSGTDFTLTISSLQPEDFATYYCQQYSTVPWTFGQGTKVEIKR

SEQ ID NO: 514 - protein, 249 aa, Artificial Sequence
  Description of Artificial Sequence: Synthetic polypeptide
EVQLVESGGGLVQPGGSLRLSCAASGYTFTNYGMNWVRQAPGKGLEWVGWINTYTGEPTYAADFKRRFTFSLDTSKSTAYLQMNSLRAEDTAVYYCAKYPHYYGSSHWYFDVWGQGTLVTVSSASTKGPEVQLQQSGPELVKPGASVKMSCKASGYTFTSYVINWVKQKPGQGLEWIGLINPYNDGTKYNEKFKVKATLTSDKSSSTAYMELSSLTSEDSAVYYCASYYYGSRYYFDYWGQGTTLTVSS

SEQ ID NO: 515 - protein, 221 aa, Artificial Sequence
  Description of Artificial Sequence: Synthetic polypeptide
DIQMTQSPSSLSASVGDRVTITCSASQDISNYLNWYQQKPGKAPKVLIYFTSSLHSGVPSRFSGSGSGTDFTLTISSLQPEDFATYYCQQYSTVPWTFGQGTKVEIKRTVAAPDIQMTQSSSYLSVSLGGRVTITCKASDHINNWLAWYQQKPGNAPRLLISGATSLETGVPSRFSGSGSGKDYTLSITSLQTEDVATYYCQQYWSIPLTFGAGTKLELKR

SEQ ID NO: 516 - protein, 256 aa, Artificial Sequence
  Description of Artificial Sequence: Synthetic polypeptide
EVQLQQSGPELVKPGASVKMSCKASGYTFTSYVINWVKQKPGQGLEWIGLINPYNDGTKYNEKFKVKATLTSDKSSSTAYMELSSLTSEDSAVYYCASYYYGSRYYFDYWGQGTTLTVSSASTKGPSVFPLAPEVQLVESGGGLVQPGGSLRLSCAASGYTFTNYGMNWVRQAPGKGLEWVGWINTYTGEPTYAADFKRRFTFSLDTSKSTAYLQMNSLRAEDTAVYYCAKYPHYYGSSHWYFDVWGQGTLVTVSS

SEQ ID NO: 517 - protein, 228 aa, Artificial Sequence
  Description of Artificial Sequence: Synthetic polypeptide
DIQMTQSSSYLSVSLGGRVTITCKASDHINNWLAWYQQKPGNAPRLLISGATSLETGVPSRFSGSGSGKDYTLSITSLQTEDVATYYCQQYWSIPLTFGAGTKLELKRTVAAPSVFIFPPDIQMTQSPSSLSASVGDRVTITCSASQDISNYLNWYQQKPGKAPKVLIYFTSSLHSGVPSRFSGSGSGTDFTLTISSLQPEDFATYYCQQYSTVPWTFGQGTKVEIKR

SEQ ID NO: 518 - protein, 256 aa, Artificial Sequence
  Description of Artificial Sequence: Synthetic polypeptide
EVQLVESGGGLVQPGGSLRLSCAASGYTFTNYGMNWVRQAPGKGLEWVGWINTYTGEPTYAADFKRRFTFSLDTSKSTAYLQMNSLRAEDTAVYYCAKYPHYYGSSHWYFDVWGQGTLVTVSSASTKGPSVFPLAPEVQLQQSGPELVKPGASVKMSCKASGYTFTSYVINWVKQKPGQGLEWIGLINPYNDGTKYNEKFKVKATLTSDKSSSTAYMELSSLTSEDSAVYYCASYYYGSRYYFDYWGQGTTLTVSS

SEQ ID NO: 519 - protein, 228 aa, Artificial Sequence
  Description of Artificial Sequence: Synthetic polypeptide
DIQMTQSPSSLSASVGDRVTITCSASQDISNYLNWYQQKPGKAPKVLIYFTSSLHSGVPSRFSGSGSGTDFTLTISSLQPEDFATYYCQQYSTVPWTFGQGTKVEIKRTVAAPSVFIFPPDIQMTQSSSYLSVSLGGRVTITCKASDHINNWLAWYQQKPGNAPRLLISGATSLETGVPSRFSGSGSGKDYTLSITSLQTEDVATYYCQQYWSIPLTFGAGTKLELKR

SEQ ID NO: 520 - protein, 256 aa, Artificial Sequence; identical to SEQ ID NO: 516
  Description of Artificial Sequence: Synthetic polypeptide

SEQ ID NO: 521 - protein, 221 aa, Artificial Sequence; identical to SEQ ID NO: 513
  Description of Artificial Sequence: Synthetic polypeptide

SEQ ID NO: 522 - protein, 256 aa, Artificial Sequence; identical to SEQ ID NO: 518
  Description of Artificial Sequence: Synthetic polypeptide

SEQ ID NO: 523 - protein, 221 aa, Artificial Sequence; identical to SEQ ID NO: 515
  Description of Artificial Sequence: Synthetic polypeptide

SEQ ID NO: 524 - protein, 249 aa, Artificial Sequence; identical to SEQ ID NO: 512
  Description of Artificial Sequence: Synthetic polypeptide

SEQ ID NO: 525 - protein, 228 aa, Artificial Sequence; identical to SEQ ID NO: 517
  Description of Artificial Sequence: Synthetic polypeptide

SEQ ID NO: 526 - protein, 249 aa, Artificial Sequence; identical to SEQ ID NO: 514
  Description of Artificial Sequence: Synthetic polypeptide

SEQ ID NO: 527 - protein, 228 aa, Artificial Sequence; identical to SEQ ID NO: 519
  Description of Artificial Sequence: Synthetic polypeptide

SEQ ID NO: 528 - protein, 246 aa, Artificial Sequence
  Description of Artificial Sequence: Synthetic polypeptide
EVQLQQSGPELVKPGASVKMSCKASGYTFTSYVINWVKQKPGQGLEWIGLINPYNDGTKYNEKFKVKATLTSDKSSSTAYMELSSLTSEDSAVYYCASYYYGSRYYFDYWGQGTTLTVSSASTKGPEVQLVESGGGLVQPGGSLRLSCAASGFTISDYWIHWVRQAPGKGLEWVAGITPAGGYTYYADSVKGRFTISADTSKNTAYLQMNSLRAEDTAVYYCARFVFFLPYAMDYWGQGTLVTVSS

SEQ ID NO: 529 - protein, 221 aa, Artificial Sequence
  Description of Artificial Sequence: Synthetic polypeptide
DIQMTQSSSYLSVSLGGRVTITCKASDHINNWLAWYQQKPGNAPRLLISGATSLETGVPSRFSGSGSGKDYTLSITSLQTEDVATYYCQQYWSIPLTFGAGTKLELKRTVAAPDIQMTQSPSSLSASVGDRVTITCRASQDVSTAVAWYQQKPGKAPKLLIYSASFLYSGVPSRFSGSGSGTDFTLTISSLQPEDFATYYCQQSYTTPPTFGQGTKVEIKR

SEQ ID NO: 530 - protein, 246 aa, Artificial Sequence
  Description of Artificial Sequence: Synthetic polypeptide
EVQLVESGGGLVQPGGSLRLSCAASGFTISDYWIHWVRQAPGKGLEWVAGITPAGGYTYYADSVKGRFTISADTSKNTAYLQMNSLRAEDTAVYYCARFVFFLPYAMDYWGQGTLVTVSSASTKGPEVQLQQSGPELVKPGASVKMSCKASGYTFTSYVINWVKQKPGQGLEWIGLINPYNDGTKYNEKFKVKATLTSDKSSSTAYMELSSLTSEDSAVYYCASYYYGSRYYFDYWGQGTTLTVSS

SEQ ID NO: 531 - protein, 221 aa, Artificial Sequence
  Description of Artificial Sequence: Synthetic polypeptide
DIQMTQSPSSLSASVGDRVTITCRASQDVSTAVAWYQQKPGKAPKLLIYSASFLYSGVPSRFSGSGSGTDFTLTISSLQPEDFATYYCQQSYTTPPTFGQGTKVEIKRTVAAPDIQMTQSSSYLSVSLGGRVTITCKASDHINNWLAWYQQKPGNAPRLLISGATSLETGVPSRFSGSGSGKDYTLSITSLQTEDVATYYCQQYWSIPLTFGAGTKLELKR

SEQ ID NO: 532 - protein, 253 aa, Artificial Sequence
  Description of Artificial Sequence: Synthetic polypeptide
EVQLQQSGPELVKPGASVKMSCKASGYTFTSYVINWVKQKPGQGLEWIGLINPYNDGTKYNEKFKVKATLTSDKSSSTAYMELSSLTSEDSAVYYCASYYYGSRYYFDYWGQGTTLTVSSASTKGPSVFPLAPEVQLVESGGGLVQPGGSLRLSCAASGFTISDYWIHWVRQAPGKGLEWVAGITPAGGYTYYADSVKGRFTISADTSKNTAYLQMNSLRAEDTAVYYCARFVFFLPYAMDYWGQGTLVTVSS

SEQ ID NO: 533 - protein, 228 aa, Artificial Sequence
  Description of Artificial Sequence: Synthetic polypeptide
DIQMTQSSSYLSVSLGGRVTITCKASDHINNWLAWYQQKPGNAPRLLISGATSLETGVPSRFSGSGSGKDYTLSITSLQTEDVATYYCQQYWSIPLTFGAGTKLELKRTVAAPSVFIFPPDIQMTQSPSSLSASVGDRVTITCRASQDVSTAVAWYQQKPGKAPKLLIYSASFLYSGVPSRFSGSGSGTDFTLTISSLQPEDFATYYCQQSYTTPPTFGQGTKVEIKR

SEQ ID NO: 534 - protein, 253 aa, Artificial Sequence
  Description of Artificial Sequence: Synthetic polypeptide
EVQLVESGGGLVQPGGSLRLSCAASGFTISDYWIHWVRQAPGKGLEWVAGITPAGGYTYYADSVKGRFTISADTSKNTAYLQMNSLRAEDTAVYYCARFVFFLPYAMDYWGQGTLVTVSSASTKGPSVFPLAPEVQLQQSGPELVKPGASVKMSCKASGYTFTSYVINWVKQKPGQGLEWIGLINPYNDGTKYNEKFKVKATLTSDKSSSTAYMELSSLTSEDSAVYYCASYYYGSRYYFDYWGQGTTLTVSS

SEQ ID NO: 535 - protein, 228 aa, Artificial Sequence
  Description of Artificial Sequence: Synthetic polypeptide
DIQMTQSPSSLSASVGDRVTITCRASQDVSTAVAWYQQKPGKAPKLLIYSASFLYSGVPSRFSGSGSGTDFTLTISSLQPEDFATYYCQQSYTTPPTFGQGTKVEIKRTVAAPSVFIFPPDIQMTQSSSYLSVSLGGRVTITCKASDHINNWLAWYQQKPGNAPRLLISGATSLETGVPSRFSGSGSGKDYTLSITSLQTEDVATYYCQQYWSIPLTFGAGTKLELKR

SEQ ID NO: 536 - protein, 253 aa, Artificial Sequence; identical to SEQ ID NO: 532
  Description of Artificial Sequence: Synthetic polypeptide

SEQ ID NO: 537 - protein, 221 aa, Artificial Sequence; identical to SEQ ID NO: 529
  Description of Artificial Sequence: Synthetic polypeptide

SEQ ID NO: 538 - protein, 253 aa, Artificial Sequence; identical to SEQ ID NO: 534
  Description of Artificial Sequence: Synthetic polypeptide

SEQ ID NO: 539 - protein, 221 aa, Artificial Sequence; identical to SEQ ID NO: 531
  Description of Artificial Sequence: Synthetic polypeptide

SEQ ID NO: 540 - protein, 246 aa, Artificial Sequence; identical to SEQ ID NO: 528
  Description of Artificial Sequence: Synthetic polypeptide

SEQ ID NO: 541 - protein, 228 aa, Artificial Sequence; identical to SEQ ID NO: 533
  Description of Artificial Sequence: Synthetic polypeptide

SEQ ID NO: 542 - protein, 246 aa, Artificial Sequence; identical to SEQ ID NO: 530
  Description of Artificial Sequence: Synthetic polypeptide

SEQ ID NO: 543 - protein, 228 aa, Artificial Sequence; identical to SEQ ID NO: 535
  Description of Artificial Sequence: Synthetic polypeptide

SEQ ID NO: 544 - protein, 247 aa, Artificial Sequence
  Description of Artificial Sequence: Synthetic polypeptide
EVQLQQSGPELVKPGASVKMSCKASGYTFTSYVINWVKQKPGQGLEWIGLINPYNDGTKYNEKFKVKATLTSDKSSSTAYMELSSLTSEDSAVYYCASYYYGSRYYFDYWGQGTTLTVSSASTKGPEVQLVESGGGLVQPGGSLRLSCAASGFTINASWIHWVRQAPGKGLEWVGAIYPYSGYTNYADSVKGRFTISADTSKNTAYLQMNSLRAEDTAVYYCARWGHSTSPWAMDYWGQGTLVTVSS

SEQ ID NO: 545 - protein, 221 aa, Artificial Sequence
  Description of Artificial Sequence: Synthetic polypeptide
DIQMTQSSSYLSVSLGGRVTITCKASDHINNWLAWYQQKPGNAPRLLISGATSLETGVPSRFSGSGSGKDYTLSITSLQTEDVATYYCQQYWSIPLTFGAGTKLELKRTVAAPDIQMTQSPSSLSASVGDRVTITCRASQVIRRSLAWYQQKPGKAPKLLIYAASNLASGVPSRFSGSGSGTDFTLTISSLQPEDFATYYCQQSNTSPLTFGQGTKVEIKR

SEQ ID NO: 546 - protein, 247 aa, Artificial Sequence
  Description of Artificial Sequence: Synthetic polypeptide
EVQLVESGGGLVQPGGSLRLSCAASGFTINASWIHWVRQAPGKGLEWVGAIYPYSGYTNYADSVKGRFTISADTSKNTAYLQMNSLRAEDTAVYYCARWGHSTSPWAMDYWGQGTLVTVSSASTKGPEVQLQQSGPELVKPGASVKMSCKASGYTFTSYVINWVKQKPGQGLEWIGLINPYNDGTKYNEKFKVKATLTSDKSSSTAYMELSSLTSEDSAVYYCASYYYGSRYYFDYWGQGTTLTVSS

SEQ ID NO: 547 - protein, 221 aa, Artificial Sequence
  Description of Artificial Sequence: Synthetic polypeptide
DIQMTQSPSSLSASVGDRVTITCRASQVIRRSLAWYQQKPGKAPKLLIYAASNLASGVPSRFSGSGSGTDFTLTISSLQPEDFATYYCQQSNTSPLTFGQGTKVEIKRTVAAPDIQMTQSSSYLSVSLGGRVTITCKASDHINNWLAWYQQKPGNAPRLLISGATSLETGVPSRFSGSGSGKDYTLSITSLQTEDVATYYCQQYWSIPLTFGAGTKLELKR

SEQ ID NO: 548 - protein, 254 aa, Artificial Sequence
  Description of Artificial Sequence: Synthetic polypeptide
EVQLQQSGPELVKPGASVKMSCKASGYTFTSYVINWVKQKPGQGLEWIGLINPYNDGTKYNEKFKVKATLTSDKSSSTAYMELSSLTSEDSAVYYCASYYYGSRYYFDYWGQGTTLTVSSASTKGPSVFPLAPEVQLVESGGGLVQPGGSLRLSCAASGFTINASWIHWVRQAPGKGLEWVGAIYPYSGYTNYADSVKGRFTISADTSKNTAYLQMNSLRAEDTAVYYCARWGHSTSPWAMDYWGQGTLVTVSS

SEQ ID NO: 549 - protein, 228 aa, Artificial Sequence
  Description of Artificial Sequence: Synthetic polypeptide
DIQMTQSSSYLSVSLGGRVTITCKASDHINNWLAWYQQKPGNAPRLLISGATSLETGVPSRFSGSGSGKDYTLSITSLQTEDVATYYCQQYWSIPLTFGAGTKLELKRTVAAPSVFIFPPDIQMTQSPSSLSASVGDRVTITCRASQVIRRSLAWYQQKPGKAPKLLIYAASNLASGVPSRFSGSGSGTDFTLTISSLQPEDFATYYCQQSNTSPLTFGQGTKVEIKR

SEQ ID NO: 550 - protein, 254 aa, Artificial Sequence
  Description of Artificial Sequence: Synthetic polypeptide
EVQLVESGGGLVQPGGSLRLSCAASGFTINASWIHWVRQAPGKGLEWVGAIYPYSGYTNYADSVKGRFTISADTSKNTAYLQMNSLRAEDTAVYYCARWGHSTSPWAMDYWGQGTLVTVSSASTKGPSVFPLAPEVQLQQSGPELVKPGASVKMSCKASGYTFTSYVINWVKQKPGQGLEWIGLINPYNDGTKYNEKFKVKATLTSDKSSSTAYMELSSLTSEDSAVYYCASYYYGSRYYFDYWGQGTTLTVSS

SEQ ID NO: 551 - protein, 228 aa, Artificial Sequence
  Description of Artificial Sequence: Synthetic polypeptide
DIQMTQSPSSLSASVGDRVTITCRASQVIRRSLAWYQQKPGKAPKLLIYAASNLASGVPSRFSGSGSGTDFTLTISSLQPEDFATYYCQQSNTSPLTFGQGTKVEIKRTVAAPSVFIFPPDIQMTQSSSYLSVSLGGRVTITCKASDHINNWLAWYQQKPGNAPRLLISGATSLETGVPSRFSGSGSGKDYTLSITSLQTEDVATYYCQQYWSIPLTFGAGTKLELKR

SEQ ID NO: 552 - protein, 254 aa, Artificial Sequence; identical to SEQ ID NO: 548
  Description of Artificial Sequence: Synthetic polypeptide

SEQ ID NO: 553 - protein, 221 aa, Artificial Sequence; identical to SEQ ID NO: 545
  Description of Artificial Sequence: Synthetic polypeptide

SEQ ID NO: 554 - protein, 254 aa, Artificial Sequence; identical to SEQ ID NO: 550
  Description of Artificial Sequence: Synthetic polypeptide

SEQ ID NO: 555 - protein, 221 aa, Artificial Sequence; identical to SEQ ID NO: 547
  Description of Artificial Sequence: Synthetic polypeptide

SEQ ID NO: 556 - protein, 247 aa, Artificial Sequence; identical to SEQ ID NO: 544
  Description of Artificial Sequence: Synthetic polypeptide

SEQ ID NO: 557 - protein, 228 aa, Artificial Sequence; identical to SEQ ID NO: 549
  Description of Artificial Sequence: Synthetic polypeptide

SEQ ID NO: 558 - protein, 247 aa, Artificial Sequence; identical to SEQ ID NO: 546
  Description of Artificial Sequence: Synthetic polypeptide

SEQ ID NO: 559 - protein, 228 aa, Artificial Sequence; identical to SEQ ID NO: 551
  Description of Artificial Sequence: Synthetic polypeptide

SEQ ID NO: 560 - protein, 249 aa, Artificial Sequence
  Description of Artificial Sequence: Synthetic polypeptide
EVQLQQSGPELEKPGASVKISCKASGYSFTGYNMNWVKQSNGKSLEWIGNIDPYFGGTNYNQKFKGKATLTVDKSSSTAYMQLKSLTSEDSAVYYCARNYDYDGGCFDYWGQGTTLTVSSASTKGPEVQLVESGGGLVQPGGSLRLSCAASGYTFTNYGMNWVRQAPGKGLEWVGWINTYTGEPTYAADFKRRFTFSLDTSKSTAYLQMNSLRAEDTAVYYCAKYPHYYGSSHWYFDVWGQGTLVTVSS

SEQ ID NO: 561 - protein, 224 aa, Artificial Sequence
  Description of Artificial Sequence: Synthetic polypeptide
QAVVTQESALTTSPGETVTLTCRSSTGAVTTSNYANWVQEKPDHLFTGLIGGTNNRAPGVPARFSGSLIGDKAALTITGAQTEDEAIYFCALWYSNHWVFGGGTKLTVLGQPKAAPDIQMTQSPSSLSASVGDRVTITCSASQDISNYLNWYQQKPGKAPKVLIYFTSSLHSGVPSRFSGSGSGTDFTLTISSLQPEDFATYYCQQYSTVPWTFGQGTKVEIKR

SEQ ID NO: 562 - protein, 249 aa, Artificial Sequence
  Description of Artificial Sequence: Synthetic polypeptide
EVQLVESGGGLVQPGGSLRLSCAASGYTFTNYGMNWVRQAPGKGLEWVGWINTYTGEPTYAADFKRRFTFSLDTSKSTAYLQMNSLRAEDTAVYYCAKYPHYYGSSHWYFDVWGQGTLVTVSSASTKGPEVQLQQSGPELEKPGASVKISCKASGYSFTGYNMNWVKQSNGKSLEWIGNIDPYFGGTNYNQKFKGKATLTVDKSSSTAYMQLKSLTSEDSAVYYCARNYDYDGGCFDYWGQGTTLTVSS

SEQ ID NO: 563 - protein, 223 aa, Artificial Sequence
  Description of Artificial Sequence: Synthetic polypeptide
DIQMTQSPSSLSASVGDRVTITCSASQDISNYLNWYQQKPGKAPKVLIYFTSSLHSGVPSRFSGSGSGTDFTLTISSLQPEDFATYYCQQYSTVPWTFGQGTKVEIKRTVAAPQAVVTQESALTTSPGETVTLTCRSSTGAVTTSNYANWVQEKPDHLFTGLIGGTNNRAPGVPARFSGSLIGDKAALTITGAQTEDEAIYFCALWYSNHWVFGGGTKLTVLG

SEQ ID NO: 564 - protein, 256 aa, Artificial Sequence
  Description of Artificial Sequence: Synthetic polypeptide
EVQLQQSGPELEKPGASVKISCKASGYSFTGYNMNWVKQSNGKSLEWIGNIDPYFGGTNYNQKFKGKATLTVDKSSSTAYMQLKSLTSEDSAVYYCARNYDYDGGCFDYWGQGTTLTVSSASTKGPSVFPLAPEVQLVESGGGLVQPGGSLRLSCAASGYTFTNYGMNWVRQAPGKGLEWVGWINTYTGEPTYAADFKRRFTFSLDTSKSTAYLQMNSLRAEDTAVYYCAKYPHYYGSSHWYFDVWGQGTLVTVSS

SEQ ID NO: 565 - protein, 231 aa, Artificial Sequence
  Description of Artificial Sequence: Synthetic polypeptide
QAVVTQESALTTSPGETVTLTCRSSTGAVTTSNYANWVQEKPDHLFTGLIGGTNNRAPGVPARFSGSLIGDKAALTITGAQTEDEAIYFCALWYSNHWVFGGGTKLTVLGQPKAAPSVTLFPPDIQMTQSPSSLSASVGDRVTITCSASQDISNYLNWYQQKPGKAPKVLIYFTSSLHSGVPSRFSGSGSGTDFTLTISSLQPEDFATYYCQQYSTVPWTFGQGTKVEIKR

SEQ ID NO: 566 - protein, 256 aa, Artificial Sequence
  Description of Artificial Sequence: Synthetic polypeptide
EVQLVESGGGLVQPGGSLRLSCAASGYTFTNYGMNWVRQAPGKGLEWVGWINTYTGEPTYAADFKRRFTFSLDTSKSTAYLQMNSLRAEDTAVYYCAKYPHYYGSSHWYFDVWGQGTLVTVSSASTKGPSVFPLAPEVQLQQSGPELEKPGASVKISCKASGYSFTGYNMNWVKQSNGKSLEWIGNIDPYFGGTNYNQKFKGKATLTVDKSSSTAYMQLKSLTSEDSAVYYCARNYDYDGGCFDYWGQGTTLTVSS

SEQ ID NO: 567 - protein, 230 aa, Artificial Sequence
  Description of Artificial Sequence: Synthetic polypeptide
DIQMTQSPSSLSASVGDRVTITCSASQDISNYLNWYQQKPGKAPKVLIYFTSSLHSGVPSRFSGSGSGTDFTLTISSLQPEDFATYYCQQYSTVPWTFGQGTKVEIKRTVAAPSVFIFPPQAVVTQESALTTSPGETVTLTCRSSTGAVTTSNYANWVQEKPDHLFTGLIGGTNNRAPGVPARFSGSLIGDKAALTITGAQTEDEAIYFCALWYSNHWVFGGGTKLTVLG

SEQ ID NO: 568 - protein, 256 aa, Artificial Sequence; identical to SEQ ID NO: 564
  Description of Artificial Sequence: Synthetic polypeptide

SEQ ID NO: 569 - protein, 224 aa, Artificial Sequence; identical to SEQ ID NO: 561
  Description of Artificial Sequence: Synthetic polypeptide

SEQ ID NO: 570 - protein, 256 aa, Artificial Sequence; identical to SEQ ID NO: 566
  Description of Artificial Sequence: Synthetic polypeptide

SEQ ID NO: 571 - protein, 223 aa, Artificial Sequence; identical to SEQ ID NO: 563
  Description of Artificial Sequence: Synthetic polypeptide

SEQ ID NO: 572 - protein, 249 aa, Artificial Sequence; identical to SEQ ID NO: 560
  Description of Artificial Sequence: Synthetic polypeptide

SEQ ID NO: 573 - protein, 231 aa, Artificial Sequence; identical to SEQ ID NO: 565
  Description of Artificial Sequence: Synthetic polypeptide

SEQ ID NO: 574 - protein, 249 aa, Artificial Sequence; identical to SEQ ID NO: 562
  Description of Artificial Sequence: Synthetic polypeptide

SEQ ID NO: 575 - protein, 230 aa, Artificial Sequence; identical to SEQ ID NO: 567
  Description of Artificial Sequence: Synthetic polypeptide

SEQ ID NO: 576 - protein, 246 aa, Artificial Sequence
  Description of Artificial Sequence: Synthetic polypeptide
EVQLQQSGPELEKPGASVKISCKASGYSFTGYNMNWVKQSNGKSLEWIGNIDPYFGGTNYNQKFKGKATLTVDKSSSTAYMQLKSLTSEDSAVYYCARNYDYDGGCFDYWGQGTTLTVSSASTKGPEVQLVESGGGLVQPGGSLRLSCAASGFTISDYWIHWVRQAPGKGLEWVAGITPAGGYTYYADSVKGRFTISADTSKNTAYLQMNSLRAEDTAVYYCARFVFFLPYAMDYWGQGTLVTVSS

SEQ ID NO: 577 - protein, 224 aa, Artificial Sequence
  Description of Artificial Sequence: Synthetic polypeptide
QAVVTQESALTTSPGETVTLTCRSSTGAVTTSNYANWVQEKPDHLFTGLIGGTNNRAPGVPARFSGSLIGDKAALTITGAQTEDEAIYFCALWYSNHWVFGGGTKLTVLGQPKAAPDIQMTQSPSSLSASVGDRVTITCRASQDVSTAVAWYQQKPGKAPKLLIYSASFLYSGVPSRFSGSGSGTDFTLTISSLQPEDFATYYCQQSYTTPPTFGQGTKVEIKR

SEQ ID NO: 578 - protein, 246 aa, Artificial Sequence
  Description of Artificial Sequence: Synthetic polypeptide
EVQLVESGGGLVQPGGSLRLSCAASGFTISDYWIHWVRQAPGKGLEWVAGITPAGGYTYYADSVKGRFTISADTSKNTAYLQMNSLRAEDTAVYYCARFVFFLPYAMDYWGQGTLVTVSSASTKGPEVQLQQSGPELEKPGASVKISCKASGYSFTGYNMNWVKQSNGKSLEWIGNIDPYFGGTNYNQKFKGKATLTVDKSSSTAYMQLKSLTSEDSAVYYCARNYDYDGGCFDYWGQGTTLTVSS

SEQ ID NO: 579 - protein, 223 aa, Artificial Sequence
  Description of Artificial Sequence: Synthetic polypeptide
DIQMTQSPSSLSASVGDRVTITCRASQDVSTAVAWYQQKPGKAPKLLIYSASFLYSGVPSRFSGSGSGTDFTLTISSLQPEDFATYYCQQSYTTPPTFGQGTKVEIKRTVAAPQAVVTQESALTTSPGETVTLTCRSSTGAVTTSNYANWVQEKPDHLFTGLIGGTNNRAPGVPARFSGSLIGDKAALTITGAQTEDEAIYFCALWYSNHWVFGGGTKLTVLG

SEQ ID NO: 580 - protein, 253 aa, Artificial Sequence
  Description of Artificial Sequence: Synthetic polypeptide
EVQLQQSGPELEKPGASVKISCKASGYSFTGYNMNWVKQSNGKSLEWIGNIDPYFGGTNYNQKFKGKATLTVDKSSSTAYMQLKSLTSEDSAVYYCARNYDYDGGCFDYWGQGTTLTVSSASTKGPSVFPLAPEVQLVESGGGLVQPGGSLRLSCAASGFTISDYWIHWVRQAPGKGLEWVAGITPAGGYTYYADSVKGRFTISADTSKNTAYLQMNSLRAEDTAVYYCARFVFFLPYAMDYWGQGTLVTVSS

SEQ ID NO: 581 - protein, 231 aa, Artificial Sequence
  Description of Artificial Sequence: Synthetic polypeptide
QAVVTQESALTTSPGETVTLTCRSSTGAVTTSNYANWVQEKPDHLFTGLIGGTNNRAPGVPARFSGSLIGDKAALTITGAQTEDEAIYFCALWYSNHWVFGGGTKLTVLGQPKAAPSVTLFPPDIQMTQSPSSLSASVGDRVTITCRASQDVSTAVAWYQQKPGKAPKLLIYSASFLYSGVPSRFSGSGSGTDFTLTISSLQPEDFATYYCQQSYTTPPTFGQGTKVEIKR

SEQ ID NO: 582 - protein, 253 aa, Artificial Sequence
  Description of Artificial Sequence: Synthetic polypeptide
EVQLVESGGGLVQPGGSLRLSCAASGFTISDYWIHWVRQAPGKGLEWVAGITPAGGYTYYADSVKGRFTISADTSKNTAYLQMNSLRAEDTAVYYCARFVFFLPYAMDYWGQGTLVTVSSASTKGPSVFPLAPEVQLQQSGPELEKPGASVKISCKASGYSFTGYNMNWVKQSNGKSLEWIGNIDPYFGGTNYNQKFKGKATLTVDKSSSTAYMQLKSLTSEDSAVYYCARNYDYDGGCFDYWGQGTTLTVSS

SEQ ID NO: 583 - protein, 230 aa, Artificial Sequence
  Description of Artificial Sequence: Synthetic polypeptide
DIQMTQSPSSLSASVGDRVTITCRASQDVSTAVAWYQQKPGKAPKLLIYSASFLYSGVPSRFSGSGSGTDFTLTISSLQPEDFATYYCQQSYTTPPTFGQGTKVEIKRTVAAPSVFIFPPQAVVTQESALTTSPGETVTLTCRSSTGAVTTSNYANWVQEKPDHLFTGLIGGTNNRAPGVPARFSGSLIGDKAALTITGAQTEDEAIYFCALWYSNHWVFGGGTKLTVLG

SEQ ID NO: 584 - protein, 253 aa, Artificial Sequence; identical to SEQ ID NO: 580
  Description of Artificial Sequence: Synthetic polypeptide

SEQ ID NO: 585 - protein, 224 aa, Artificial Sequence; identical to SEQ ID NO: 577
  Description of Artificial Sequence: Synthetic polypeptide

SEQ ID NO: 586 - protein, 253 aa, Artificial Sequence; identical to SEQ ID NO: 582
  Description of Artificial Sequence: Synthetic polypeptide

SEQ ID NO: 587 - protein, 223 aa, Artificial Sequence; identical to SEQ ID NO: 579
  Description of Artificial Sequence: Synthetic polypeptide

SEQ ID NO: 588 - protein, 246 aa, Artificial Sequence; identical to SEQ ID NO: 576
  Description of Artificial Sequence: Synthetic polypeptide

SEQ ID NO: 589 - protein, 231 aa, Artificial Sequence; identical to SEQ ID NO: 581
  Description of Artificial Sequence: Synthetic polypeptide

SEQ ID NO: 590 - protein, 246 aa, Artificial Sequence; identical to SEQ ID NO: 578
  Description of Artificial Sequence: Synthetic polypeptide

SEQ ID NO: 591 - protein, 230 aa, Artificial Sequence; identical to SEQ ID NO: 583
  Description of Artificial Sequence: Synthetic polypeptide

SEQ ID NO: 592 - protein, 247 aa, Artificial Sequence
  Description of Artificial Sequence: Synthetic polypeptide
EVQLQQSGPELEKPGASVKISCKASGYSFTGYNMNWVKQSNGKSLEWIGNIDPYFGGTNYNQKFKGKATLTVDKSSSTAYMQLKSLTSEDSAVYYCARNYDYDGGCFDYWGQGTTLTVSSASTKGPEVQLVESGGGLVQPGGSLRLSCAASGFTINASWIHWVRQAPGKGLEWVGAIYPYSGYTNYADSVKGRFTISADTSKNTAYLQMNSLRAEDTAVYYCARWGHSTSPWAMDYWGQGTLVTVSS

SEQ ID NO: 593 - protein, 224 aa, Artificial Sequence
  Description of Artificial Sequence: Synthetic polypeptide
QAVVTQESALTTSPGETVTLTCRSSTGAVTTSNYANWVQEKPDHLFTGLIGGTNNRAPGVPARFSGSLIGDKAALTITGAQTEDEAIYFCALWYSNHWVFGGGTKLTVLGQPKAAPDIQMTQSPSSLSASVGDRVTITCRASQVIRRSLAWYQQKPGKAPKLLIYAASNLASGVPSRFSGSGSGTDFTLTISSLQPEDFATYYCQQSNTSPLTFGQGTKVEIKR

SEQ ID NO: 594 - protein, 247 aa, Artificial Sequence
  Description of Artificial Sequence: Synthetic polypeptide
EVQLVESGGGLVQPGGSLRLSCAASGFTINASWIHWVRQAPGKGLEWVGAIYPYSGYTNYADSVKGRFTISADTSKNTAYLQMNSLRAEDTAVYYCARWGHSTSPWAMDYWGQGTLVTVSSASTKGPEVQLQQSGPELEKPGASVKISCKASGYSFTGYNMNWVKQSNGKSLEWIGNIDPYFGGTNYNQKFKGKATLTVDKSSSTAYMQLKSLTSEDSAVYYCARNYDYDGGCFDYWGQGTTLTVSS

SEQ ID NO: 595 - protein, 223 aa, Artificial Sequence
  Description of Artificial Sequence: Synthetic polypeptide
DIQMTQSPSSLSASVGDRVTITCRASQVIRRSLAWYQQKPGKAPKLLIYAASNLASGVPSRFSGSGSGTDFTLTISSLQPEDFATYYCQQSNTSPLTFGQGTKVEIKRTVAAPQAVVTQESALTTSPGETVTLTCRSSTGAVTTSNYANWVQEKPDHLFTGLIGGTNNRAPGVPARFSGSLIGDKAALTITGAQTEDEAIYFCALWYSNHWVFGGGTKLTVLG

SEQ ID NO: 596 - protein, 254 aa, Artificial Sequence
  Description of Artificial Sequence: Synthetic polypeptide
EVQLQQSGPELEKPGASVKISCKASGYSFTGYNMNWVKQSNGKSLEWIGNIDPYFGGTNYNQKFKGKATLTVDKSSSTAYMQLKSLTSEDSAVYYCARNYDYDGGCFDYWGQGTTLTVSSASTKGPSVFPLAPEVQLVESGGGLVQPGGSLRLSCAASGFTINASWIHWVRQAPGKGLEWVGAIYPYSGYTNYADSVKGRFTISADTSKNTAYLQMNSLRAEDTAVYYCARWGHSTSPWAMDYWGQGTLVTVSS

SEQ ID NO: 597 - protein, 231 aa, Artificial Sequence
  Description of Artificial Sequence: Synthetic polypeptide
QAVVTQESALTTSPGETVTLTCRSSTGAVTTSNYANWVQEKPDHLFTGLIGGTNNRAPGVPARFSGSLIGDKAALTITGAQTEDEAIYFCALWYSNHWVFGGGTKLTVLGQPKAAPSVTLFPPDIQMTQSPSSLSASVGDRVTITCRASQVIRRSLAWYQQKPGKAPKLLIYAASNLASGVPSRFSGSGSGTDFTLTISSLQPEDFATYYCQQSNTSPLTFGQGTKVEIKR

SEQ ID NO: 598 - protein, 254 aa, Artificial Sequence
  Description of Artificial Sequence: Synthetic polypeptide
EVQLVESGGGLVQPGGSLRLSCAASGFTINASWIHWVRQAPGKGLEWVGAIYPYSGYTNYADSVKGRFTISADTSKNTAYLQMNSLRAEDTAVYYCARWGHSTSPWAMDYWGQGTLVTVSSASTKGPSVFPLAPEVQLQQSGPELEKPGASVKISCKASGYSFTGYNMNWVKQSNGKSLEWIGNIDPYFGGTNYNQKFKGKATLTVDKSSSTAYMQLKSLTSEDSAVYYCARNYDYDGGCFDYWGQGTTLTVSS

SEQ ID NO: 599 - protein, 230 aa, Artificial Sequence
  Description of Artificial Sequence: Synthetic polypeptide
DIQMTQSPSSLSASVGDRVTITCRASQVIRRSLAWYQQKPGKAPKLLIYAASNLASGVPSRFSGSGSGTDFTLTISSLQPEDFATYYCQQSNTSPLTFGQGTKVEIKRTVAAPSVFIFPPQAVVTQESALTTSPGETVTLTCRSSTGAVTTSNYANWVQEKPDHLFTGLIGGTNNRAPGVPARFSGSLIGDKAALTITGAQTEDEAIYFCALWYSNHWVFGGGTKLTVLG

SEQ ID NO: 600 - protein, 254 aa, Artificial Sequence; identical to SEQ ID NO: 596
  Description of Artificial Sequence: Synthetic polypeptide

SEQ ID NO: 601 - protein, 224 aa, Artificial Sequence; identical to SEQ ID NO: 593
  Description of Artificial Sequence: Synthetic polypeptide

SEQ ID NO: 602 - protein, 254 aa, Artificial Sequence; identical to SEQ ID NO: 598
  Description of Artificial Sequence: Synthetic polypeptide

SEQ ID NO: 603 - protein, 223 aa, Artificial Sequence; identical to SEQ ID NO: 595
  Description of Artificial Sequence: Synthetic polypeptide

SEQ ID NO: 604 - protein, 247 aa, Artificial Sequence; identical to SEQ ID NO: 592
  Description of Artificial Sequence: Synthetic polypeptide

SEQ ID NO: 605 - protein, 231 aa, Artificial Sequence; identical to SEQ ID NO: 597
  Description of Artificial Sequence: Synthetic polypeptide

SEQ ID NO: 606 - protein, 247 aa, Artificial Sequence; identical to SEQ ID NO: 594
  Description of Artificial Sequence: Synthetic polypeptide

SEQ ID NO: 607 - protein, 230 aa, Artificial Sequence; identical to SEQ ID NO: 599
  Description of Artificial Sequence: Synthetic polypeptide

SEQ ID NO: 608 - protein, 250 aa, Artificial Sequence
  Description of Artificial Sequence: Synthetic polypeptide
QVQLQQWGAGLLKPSETLSLTCAVYGGSFSGYYWSWIRQPPGKGLEWIGEINHSGSTNYNPSLKSRVTISVETSKNQFSLKLSSVTAADTAVYYCARDKWTWYFDLWGRGTLVTVSSASTKGPSVFPLAPEVQLVESGGGLVQPGGSLRLSCAASGFNIKDTYIHWVRQAPGKGLEWVARIYPTNGYTRYADSVKGRFTISADTSKNTAYLQMNSLRAEDTAVYYCSRWGGDGFYAMDYWGQGTLVTVSS

SEQ ID NO: 609 - protein, 234 aa, Artificial Sequence
  Description of Artificial Sequence: Synthetic polypeptide
DIEMTQSPDSLAVSLGERATINCRSSQSVLYSSSNRNYLAWYQQNPGQPPKLLIYWASTRESGVPDRFSGSGSGTDFTLTISSLQAEDVAVYYCQQYYSTPRTFGQGTKVEIKRTVAAPSVFIFPPDIQMTQSPSSLSASVGDRVTITCRASQDVNTAVAWYQQKPGKAPKLLIYSASFLYSGVPSRFSGSRSGTDFTLTISSLQPEDFATYYCQQHYTTPPTFGQGTKVEIKR

SEQ ID NO: 610 - protein, 250 aa, Artificial Sequence
  Description of Artificial Sequence: Synthetic polypeptide
EVQLVESGGGLVQPGGSLRLSCAASGFNIKDTYIHWVRQAPGKGLEWVARIYPTNGYTRYADSVKGRFTISADTSKNTAYLQMNSLRAEDTAVYYCSRWGGDGFYAMDYWGQGTLVTVSSASTKGPSVFPLAPQVQLQQWGAGLLKPSETLSLTCAVYGGSFSGYYWSWIRQPPGKGLEWIGEINHSGSTNYNPSLKSRVTISVETSKNQFSLKLSSVTAADTAVYYCARDKWTWYFDLWGRGTLVTVSS

SEQ ID NO: 611 - protein, 234 aa, Artificial Sequence
  Description of Artificial Sequence: Synthetic polypeptide
DIQMTQSPSSLSASVGDRVTITCRASQDVNTAVAWYQQKPGKAPKLLIYSASFLYSGVPSRFSGSRSGTDFTLTISSLQPEDFATYYCQQHYTTPPTFGQGTKVEIKRTVAAPSVFIFPPDIEMTQSPDSLAVSLGERATINCRSSQSVLYSSSNRNYLAWYQQNPGQPPKLLIYWASTRESGVPDRFSGSGSGTDFTLTISSLQAEDVAVYYCQQYYSTPRTFGQGTKVEIKR

SEQ ID NO: 612 - protein, 250 aa, Artificial Sequence; identical to SEQ ID NO: 608
  Description of Artificial Sequence: Synthetic polypeptide

SEQ ID NO: 613 - protein, 227 aa, Artificial Sequence
  Description of Artificial Sequence: Synthetic polypeptide
DIEMTQSPDSLAVSLGERATINCRSSQSVLYSSSNRNYLAWYQQNPGQPPKLLIYWASTRESGVPDRFSGSGSGTDFTLTISSLQAEDVAVYYCQQYYSTPRTFGQGTKVEIKRTVAAPDIQMTQSPSSLSASVGDRVTITCRASQDVNTAVAWYQQKPGKAPKLLIYSASFLYSGVPSRFSGSRSGTDFTLTISSLQPEDFATYYCQQHYTTPPTFGQGTKVEIKR

SEQ ID NO: 614 - protein, 250 aa, Artificial Sequence; identical to SEQ ID NO: 610
  Description of Artificial Sequence: Synthetic polypeptide

SEQ ID NO: 615 - protein, 227 aa, Artificial Sequence
  Description of Artificial Sequence: Synthetic polypeptide
DIQMTQSPSSLSASVGDRVTITCRASQDVNTAVAWYQQKPGKAPKLLIYSASFLYSGVPSRFSGSRSGTDFTLTISSLQPEDFATYYCQQHYTTPPTFGQGTKVEIKRTVAAPDIEMTQSPDSLAVSLGERATINCRSSQSVLYSSSNRNYLAWYQQNPGQPPKLLIYWASTRESGVPDRFSGSGSGTDFTLTISSLQAEDVAVYYCQQYYSTPRTFGQGTKVEIKR

SEQ ID NO: 616 - protein, 243 aa, Artificial Sequence
  Description of Artificial Sequence: Synthetic polypeptide
QVQLQQWGAGLLKPSETLSLTCAVYGGSFSGYYWSWIRQPPGKGLEWIGEINHSGSTNYNPSLKSRVTISVETSKNQFSLKLSSVTAADTAVYYCARDKWTWYFDLWGRGTLVTVSSASTKGPEVQLVESGGGLVQPGGSLRLSCAASGFNIKDTYIHWVRQAPGKGLEWVARIYPTNGYTRYADSVKGRFTISADTSKNTAYLQMNSLRAEDTAVYYCSRWGGDGFYAMDYWGQGTLVTVSS

SEQ ID NO: 617 - protein, 234 aa, Artificial Sequence; identical to SEQ ID NO: 609
  Description of Artificial Sequence: Synthetic polypeptide

SEQ ID NO: 618 - protein, 243 aa, Artificial Sequence
  Description of Artificial Sequence: Synthetic polypeptide
EVQLVESGGGLVQPGGSLRLSCAASGFNIKDTYIHWVRQAPGKGLEWVARIYPTNGYTRYADSVKGRFTISADTSKNTAYLQMNSLRAEDTAVYYCSRWGGDGFYAMDYWGQGTLVTVSSASTKGPQVQLQQWGAGLLKPSETLSLTCAVYGGSFSGYYWSWIRQPPGKGLEWIGEINHSGSTNYNPSLKSRVTISVETSKNQFSLKLSSVTAADTAVYYCARDKWTWYFDLWGRGTLVTVSS

SEQ ID NO: 619 - protein, 234 aa, Artificial Sequence; identical to SEQ ID NO: 611
  Description of Artificial Sequence: Synthetic polypeptide

SEQ ID NO: 620 - protein, 243 aa, Artificial Sequence; identical to SEQ ID NO: 616
  Description of Artificial Sequence: Synthetic polypeptide

SEQ ID NO: 621 - protein, 227 aa, Artificial Sequence; identical to SEQ ID NO: 613
  Description of Artificial Sequence: Synthetic polypeptide

SEQ ID NO: 622 - protein, 243 aa, Artificial Sequence; identical to SEQ ID NO: 618
  Description of Artificial Sequence: Synthetic polypeptide

SEQ ID NO: 623 - protein, 227 aa, Artificial Sequence; identical to SEQ ID NO: 615
  Description of Artificial Sequence: Synthetic polypeptide

SEQ ID NO: 624 - protein, 252 aa, Artificial Sequence
  Description of Artificial Sequence: Synthetic polypeptide
EVQLVESGGGLVQPGGSLRLSCAASGFTFSIYSMNWVRQAPGKGLEWVSYISSSSSTIYYADSVKGRFTISRDNAKNSLYLQMNSLRDEDTAVYYCARDRGDFDAFDIWGQGTMVTVSSASTKGPSVFPLAPEVQLVESGGGLVQPGGSLRLSCAASGFNIKDTYIHWVRQAPGKGLEWVARIYPTNGYTRYADSVKGRFTISADTSKNTAYLQMNSLRAEDTAVYYCSRWGGDGFYAMDYWGQGTLVTVSS

SEQ ID NO: 625 - protein, 228 aa, Artificial Sequence
  Description of Artificial Sequence: Synthetic polypeptide
DIQMTQSPSSLSASVGDRVTITCQASQDITNYLNWYQQKPGKAPKLLIYDASNLETGVPSRFSGSGSGTDFTFTISSLQPEDIATYNCQQCENFPITFGQGTRLEIKRTVAAPSVFIFPPDIQMTQSPSSLSASVGDRVTITCRASQDVNTAVAWYQQKPGKAPKLLIYSASFLYSGVPSRFSGSRSGTDFTLTISSLQPEDFATYYCQQHYTTPPTFGQGTKVEIKR

SEQ ID NO: 626 - protein, 252 aa, Artificial Sequence
  Description of Artificial Sequence: Synthetic polypeptide
EVQLVESGGGLVQPGGSLRLSCAASGFNIKDTYIHWVRQAPGKGLEWVARIYPTNGYTRYADSVKGRFTISADTSKNTAYLQMNSLRAEDTAVYYCSRWGGDGFYAMDYWGQGTLVTVSSASTKGPSVFPLAPEVQLVESGGGLVQPGGSLRLSCAASGFTFSIYSMNWVRQAPGKGLEWVSYISSSSSTIYYADSVKGRFTISRDNAKNSLYLQMNSLRDEDTAVYYCARDRGDFDAFDIWGQGTMVTVSS

SEQ ID NO: 627 - protein, 228 aa, Artificial Sequence
  Description of Artificial Sequence: Synthetic polypeptide
DIQMTQSPSSLSASVGDRVTITCRASQDVNTAVAWYQQKPGKAPKLLIYSASFLYSGVPSRFSGSRSGTDFTLTISSLQPEDFATYYCQQHYTTPPTFGQGTKVEIKRTVAAPSVFIFPPDIQMTQSPSSLSASVGDRVTITCQASQDITNYLNWYQQKPGKAPKLLIYDASNLETGVPSRFSGSGSGTDFTFTISSLQPEDIATYNCQQCENFPITFGQGTRLEIKR

SEQ ID NO: 628 - protein, 252 aa, Artificial Sequence; identical to SEQ ID NO: 624
  Description of Artificial Sequence: Synthetic polypeptide

SEQ ID NO: 629 - protein, 221 aa, Artificial Sequence
  Description of Artificial Sequence: Synthetic polypeptide
DIQMTQSPSSLSASVGDRVTITCQASQDITNYLNWYQQKPGKAPKLLIYDASNLETGVPSRFSGSGSGTDFTFTISSLQPEDIATYNCQQCENFPITFGQGTRLEIKRTVAAPDIQMTQSPSSLSASVGDRVTITCRASQDVNTAVAWYQQKPGKAPKLLIYSASFLYSGVPSRFSGSRSGTDFTLTISSLQPEDFATYYCQQHYTTPPTFGQGTKVEIKR

SEQ ID NO: 630 - protein, 252 aa, Artificial Sequence; identical to SEQ ID NO: 626
  Description of Artificial Sequence: Synthetic polypeptide

SEQ ID NO: 631 - protein, 221 aa, Artificial Sequence
  Description of Artificial Sequence: Synthetic polypeptide
DIQMTQSPSSLSASVGDRVTITCRASQDVNTAVAWYQQKPGKAPKLLIYSASFLYSGVPSRFSGSRSGTDFTLTISSLQPEDFATYYCQQHYTTPPTFGQGTKVEIKRTVAAPDIQMTQSPSSLSASVGDRVTITCQASQDITNYLNWYQQKPGKAPKLLIYDASNLETGVPSRFSGSGSGTDFTFTISSLQPEDIATYNCQQCENFPITFGQGTRLEIKR

SEQ ID NO: 632 - protein, 245 aa, Artificial Sequence
  Description of Artificial Sequence: Synthetic polypeptide
EVQLVESGGGLVQPGGSLRLSCAASGFTFSIYSMNWVRQAPGKGLEWVSYISSSSSTIYYADSVKGRFTISRDNAKNSLYLQMNSLRDEDTAVYYCARDRGDFDAFDIWGQGTMVTVSSASTKGPEVQLVESGGGLVQPGGSLRLSCAASGFNIKDTYIHWVRQAPGKGLEWVARIYPTNGYTRYADSVKGRFTISADTSKNTAYLQMNSLRAEDTAVYYCSRWGGDGFYAMDYWGQGTLVTVSS

SEQ ID NO: 633 - protein, 228 aa, Artificial Sequence; identical to SEQ ID NO: 625
  Description of Artificial Sequence: Synthetic polypeptide

SEQ ID NO: 634 - protein, 245 aa, Artificial Sequence
  Description of Artificial Sequence: Synthetic polypeptide
EVQLVESGGGLVQPGGSLRLSCAASGFNIKDTYIHWVRQAPGKGLEWVARIYPTNGYTRYADSVKGRFTISADTSKNTAYLQMNSLRAEDTAVYYCSRWGGDGFYAMDYWGQGTLVTVSSASTKGPEVQLVESGGGLVQPGGSLRLSCAASGFTFSIYSMNWVRQAPGKGLEWVSYISSSSSTIYYADSVKGRFTISRDNAKNSLYLQMNSLRDEDTAVYYCARDRGDFDAFDIWGQGTMVTVSS

SEQ ID NO: 635 - protein, 228 aa, Artificial Sequence; identical to SEQ ID NO: 627
  Description of Artificial Sequence: Synthetic polypeptide

SEQ ID NO: 636 - protein, 245 aa, Artificial Sequence; identical to SEQ ID NO: 632
  Description of Artificial Sequence: Synthetic polypeptide

SEQ ID NO: 637 - protein, 221 aa, Artificial Sequence; identical to SEQ ID NO: 629
  Description of Artificial Sequence: Synthetic polypeptide

SEQ ID NO: 638 - protein, 245 aa, Artificial Sequence; identical to SEQ ID NO: 634
  Description of Artificial Sequence: Synthetic polypeptide

SEQ ID NO: 639 - protein, 221 aa, Artificial Sequence; identical to SEQ ID NO: 631
  Description of Artificial Sequence: Synthetic polypeptide

SEQ ID NO: 640 - protein, 244 aa, Artificial Sequence
  Description of Artificial Sequence: Synthetic polypeptide
EVQLLESGGGLVQPGGSLRLSCAASGFTFSHYVMAWVRQAPGKGLEWVSSISSSGGWTLYADSVKGRFTISRDNSKNTLYLQMNSLRAEDTAVYYCTRGLKMATIFDYWGQGTLVTVSSASTKGPQVQLKQSGPGLVQPSQSLSITCTVSGFSLTNYGVHWVRQSPGKGLEWLGVIWSGGNTDYNTPFTSRLSINKDNSKSQVFFKMNSLQSNDTAIYYCARALTYYDYEFAYWGQGTLVTVSA

SEQ ID NO: 641 - protein, 226 aa, Artificial Sequence
  Description of Artificial Sequence: Synthetic polypeptide
QSALTQPASVSGSPGQSITISCTGTSSDVGSYNVVSWYQQHPGKAPKLIIYEVSQRPSGVSNRFSGSKSGNTASLTISGLQTEDEADYYCCSYAGSSIFVIFGGGTKVTVLGQPKAAPDILLTQSPVILSVSPGERVSFSCRASQSIGTNIHWYQQRTNGSPRLLIKYASESISGIPSRFSGSGSGTDFTLSINSVESEDIADYYCQQNNNWPTTFGAGTKLELKR

SEQ ID NO: 642 - protein, 244 aa, Artificial Sequence
  Description of Artificial Sequence: Synthetic polypeptide
QVQLKQSGPGLVQPSQSLSITCTVSGFSLTNYGVHWVRQSPGKGLEWLGVIWSGGNTDYNTPFTSRLSINKDNSKSQVFFKMNSLQSNDTAIYYCARALTYYDYEFAYWGQGTLVTVSAASTKGPEVQLLESGGGLVQPGGSLRLSCAASGFTFSHYVMAWVRQAPGKGLEWVSSISSSGGWTLYADSVKGRFTISRDNSKNTLYLQMNSLRAEDTAVYYCTRGLKMATIFDYWGQGTLVTVSS

SEQ ID NO: 643 - protein, 225 aa, Artificial Sequence
  Description of Artificial Sequence: Synthetic polypeptide
DILLTQSPVILSVSPGERVSFSCRASQSIGTNIHWYQQRTNGSPRLLIKYASESISGIPSRFSGSGSGTDFTLSINSVESEDIADYYCQQNNNWPTTFGAGTKLELKRTVAAPQSALTQPASVSGSPGQSITISCTGTSSDVGSYNVVSWYQQHPGKAPKLIIYEVSQRPSGVSNRFSGSKSGNTASLTISGLQTEDEADYYCCSYAGSSIFVIFGGGTKVTVLG

SEQ ID NO: 644 - protein, 251 aa, Artificial Sequence
  Description of Artificial Sequence: Synthetic polypeptide
EVQLLESGGGLVQPGGSLRLSCAASGFTFSHYVMAWVRQAPGKGLEWVSSISSSGGWTLYADSVKGRFTISRDNSKNTLYLQMNSLRAEDTAVYYCTRGLKMATIFDYWGQGTLVTVSSASTKGPSVFPLAPQVQLKQSGPGLVQPSQSLSITCTVSGFSLTNYGVHWVRQSPGKGLEWLGVIWSGGNTDYNTPFTSRLSINKDNSKSQVFFKMNSLQSNDTAIYYCARALTYYDYEFAYWGQGTLVTVSA

SEQ ID NO: 645 - protein, 233 aa, Artificial Sequence
  Description of Artificial Sequence: Synthetic polypeptide
QSALTQPASVSGSPGQSITISCTGTSSDVGSYNVVSWYQQHPGKAPKLIIYEVSQRPSGVSNRFSGSKSGNTASLTISGLQTEDEADYYCCSYAGSSIFVIFGGGTKVTVLGQPKAAPSVTLFPPDILLTQSPVILSVSPGERVSFSCRASQSIGTNIHWYQQRTNGSPRLLIKYASESISGIPSRFSGSGSGTDFTLSINSVESEDIADYYCQQNNNWPTTFGAGTKLELKR

SEQ ID NO: 646 - protein, 251 aa, Artificial Sequence
  Description of Artificial Sequence: Synthetic polypeptide
QVQLKQSGPGLVQPSQSLSITCTVSGFSLTNYGVHWVRQSPGKGLEWLGVIWSGGNTDYNTPFTSRLSINKDNSKSQVFFKMNSLQSNDTAIYYCARALTYYDYEFAYWGQGTLVTVSAASTKGPSVFPLAPEVQLLESGGGLVQPGGSLRLSCAASGFTFSHYVMAWVRQAPGKGLEWVSSISSSGGWTLYADSVKGRFTISRDNSKNTLYLQMNSLRAEDTAVYYCTRGLKMATIFDYWGQGTLVTVSS

SEQ ID NO: 647 - protein, 232 aa, Artificial Sequence
  Description of Artificial Sequence: Synthetic polypeptide
DILLTQSPVILSVSPGERVSFSCRASQSIGTNIHWYQQRTNGSPRLLIKYASESISGIPSRFSGSGSGTDFTLSINSVESEDIADYYCQQNNNWPTTFGAGTKLELKRTVAAPSVFIFPPQSALTQPASVSGSPGQSITISCTGTSSDVGSYNVVSWYQQHPGKAPKLIIYEVSQRPSGVSNRFSGSKSGNTASLTISGLQTEDEADYYCCSYAGSSIFVIFGGGTKVTVLG

SEQ ID NO: 648 - protein, 251 aa, Artificial Sequence; identical to SEQ ID NO: 644
  Description of Artificial Sequence: Synthetic polypeptide

SEQ ID NO: 649 - protein, 226 aa, Artificial Sequence; identical to SEQ ID NO: 641
  Description of Artificial Sequence: Synthetic polypeptide

SEQ ID NO: 650 - protein, 251 aa, Artificial Sequence; identical to SEQ ID NO: 646
  Description of Artificial Sequence: Synthetic polypeptide

SEQ ID NO: 651 - protein, 225 aa, Artificial Sequence; identical to SEQ ID NO: 643
  Description of Artificial Sequence: Synthetic polypeptide

SEQ ID NO: 652 - protein, 244 aa, Artificial Sequence; identical to SEQ ID NO: 640
  Description of Artificial Sequence: Synthetic polypeptide

SEQ ID NO: 653 - protein, 233 aa, Artificial Sequence; identical to SEQ ID NO: 645
  Description of Artificial Sequence: Synthetic polypeptide

SEQ ID NO: 654 - protein, 244 aa, Artificial Sequence; identical to SEQ ID NO: 642
  Description of Artificial Sequence: Synthetic polypeptide

SEQ ID NO: 655 - protein, 232 aa, Artificial Sequence; identical to SEQ ID NO: 647
  Description of Artificial Sequence: Synthetic polypeptide

SEQ ID NO: 656 - protein, 245 aa, Artificial Sequence
  Description of Artificial Sequence: Synthetic polypeptide
EVQLLESGGGLVQPGGSLRLSCAASGFTFSHYVMAWVRQAPGKGLEWVSSISSSGGWTLYADSVKGRFTISRDNSKNTLYLQMNSLRAEDTAVYYCTRGLKMATIFDYWGQGTLVTVSSASTKGPEVQLVESGGGLVQPGGSLRLSCAASGFNIKDTYIHWVRQAPGKGLEWVARIYPTNGYTRYADSVKGRFTISADTSKNTAYLQMNSLRAEDTAVYYCSRWGGDGFYAMDYWGQGTLVTVSS

SEQ ID NO: 657 - protein, 226 aa, Artificial Sequence
  Description of Artificial Sequence: Synthetic polypeptide
QSALTQPASVSGSPGQSITISCTGTSSDVGSYNVVSWYQQHPGKAPKLIIYEVSQRPSGVSNRFSGSKSGNTASLTISGLQTEDEADYYCCSYAGSSIFVIFGGGTKVTVLGQPKAAPDIQMTQSPSSLSASVGDRVTITCRASQDVNTAVAWYQQKPGKAPKLLIYSASFLYSGVPSRFSGSRSGTDFTLTISSLQPEDFATYYCQQHYTTPPTFGQGTKVEIKR

SEQ ID NO: 658 - protein, 245 aa, Artificial Sequence
  Description of Artificial Sequence: Synthetic polypeptide
EVQLVESGGGLVQPGGSLRLSCAASGFNIKDTYIHWVRQAPGKGLEWVARIYPTNGYTRYADSVKGRFTISADTSKNTAYLQMNSLRAEDTAVYYCSRWGGDGFYAMDYWGQGTLVTVSSASTKGPEVQLLESGGGLVQPGGSLRLSCAASGFTFSHYVMAWVRQAPGKGLEWVSSISSSGGWTLYADSVKGRFTISRDNSKNTLYLQMNSLRAEDTAVYYCTRGLKMATIFDYWGQGTLVTVSS

SEQ ID NO: 659 - protein, 225 aa, Artificial Sequence
  Description of Artificial Sequence: Synthetic polypeptide
DIQMTQSPSSLSASVGDRVTITCRASQDVNTAVAWYQQKPGKAPKLLIYSASFLYSGVPSRFSGSRSGTDFTLTISSLQPEDFATYYCQQHYTTPPTFGQGTKVEIKRTVAAPQSALTQPASVSGSPGQSITISCTGTSSDVGSYNVVSWYQQHPGKAPKLIIYEVSQRPSGVSNRFSGSKSGNTASLTISGLQTEDEADYYCCSYAGSSIFVIFGGGTKVTVLG

SEQ ID NO: 660 - protein, 252 aa, Artificial Sequence
  Description of Artificial Sequence: Synthetic polypeptide
EVQLLESGGGLVQPGGSLRLSCAASGFTFSHYVMAWVRQAPGKGLEWVSSISSSGGWTLYADSVKGRFTISRDNSKNTLYLQMNSLRAEDTAVYYCTRGLKMATIFDYWGQGTLVTVSSASTKGPSVFPLAPEVQLVESGGGLVQPGGSLRLSCAASGFNIKDTYIHWVRQAPGKGLEWVARIYPTNGYTRYADSVKGRFTISADTSKNTAYLQMNSLRAEDTAVYYCSRWGGDGFYAMDYWGQGTLVTVSS

SEQ ID NO: 661 - protein, 233 aa, Artificial Sequence
  Description of Artificial Sequence: Synthetic polypeptide
QSALTQPASVSGSPGQSITISCTGTSSDVGSYNVVSWYQQHPGKAPKLIIYEVSQRPSGVSNRFSGSKSGNTASLTISGLQTEDEADYYCCSYAGSSIFVIFGGGTKVTVLGQPKAAPSVTLFPPDIQMTQSPSSLSASVGDRVTITCRASQDVNTAVAWYQQKPGKAPKLLIYSASFLYSGVPSRFSGSRSGTDFTLTISSLQPEDFATYYCQQHYTTPPTFGQGTKVEIKR

SEQ ID NO: 662 - protein, 252 aa, Artificial Sequence
  Description of Artificial Sequence: Synthetic polypeptide
EVQLVESGGGLVQPGGSLRLSCAASGFNIKDTYIHWVRQAPGKGLEWVARIYPTNGYTRYADSVKGRFTISADTSKNTAYLQMNSLRAEDTAVYYCSRWGGDGFYAMDYWGQGTLVTVSSASTKGPSVFPLAPEVQLLESGGGLVQPGGSLRLSCAASGFTFSHYVMAWVRQAPGKGLEWVSSISSSGGWTLYADSVKGRFTISRDNSKNTLYLQMNSLRAEDTAVYYCTRGLKMATIFDYWGQGTLVTVSS

SEQ ID NO: 663 - protein, 232 aa, Artificial Sequence
  Description of Artificial Sequence: Synthetic polypeptide
DIQMTQSPSSLSASVGDRVTITCRASQDVNTAVAWYQQKPGKAPKLLIYSASFLYSGVPSRFSGSRSGTDFTLTISSLQPEDFATYYCQQHYTTPPTFGQGTKVEIKRTVAAPSVFIFPPQSALTQPASVSGSPGQSITISCTGTSSDVGSYNVVSWYQQHPGKAPKLIIYEVSQRPSGVSNRFSGSKSGNTASLTISGLQTEDEADYYCCSYAGSSIFVIFGGGTKVTVLG

SEQ ID NO: 664 - protein, 252 aa, Artificial Sequence; identical to SEQ ID NO: 660
  Description of Artificial Sequence: Synthetic polypeptide

SEQ ID NO: 665 - protein, 226 aa, Artificial Sequence; identical to SEQ ID NO: 657
  Description of Artificial Sequence: Synthetic polypeptide

SEQ ID NO: 666 - protein, 252 aa, Artificial Sequence; identical to SEQ ID NO: 662
  Description of Artificial Sequence: Synthetic polypeptide

SEQ ID NO: 667 - protein, 225 aa, Artificial Sequence; identical to SEQ ID NO: 659
  Description of Artificial Sequence: Synthetic polypeptide

SEQ ID NO: 668 - protein, 245 aa, Artificial Sequence; identical to SEQ ID NO: 656
  Description of Artificial Sequence: Synthetic polypeptide

SEQ ID NO: 669 - protein, 233 aa, Artificial Sequence; identical to SEQ ID NO: 661
  Description of Artificial Sequence: Synthetic polypeptide

SEQ ID NO: 670 - protein, 245 aa, Artificial Sequence; identical to SEQ ID NO: 658
  Description of Artificial Sequence: Synthetic polypeptide

SEQ ID NO: 671 - protein, 232 aa, Artificial Sequence; identical to SEQ ID NO: 663
  Description of Artificial Sequence: Synthetic polypeptide

SEQ ID NO: 672 - protein, 245 aa, Artificial Sequence
  Description of Artificial Sequence: Synthetic polypeptide
QVQLKQSGPGLVQPSQSLSITCTVSGFSLTTYGIHWVRQSPGKGLEWLGVMWSGGDTDYDAAFISRLSISKDNSKSQVFFKMNSLQANDTGIYYCARYRFYGMDYWGQGTSVTVSSASTKGPEVQLVESGGGLVQPGGSLRLSCAASGYTFTNYGMNWVRQAPGKGLEWVGWINTYTGEPTYAADFKRRFTFSLDTSKSTAYLQMNSLRAEDTAVYYCAKYPHYYGSSHWYFDVWGQGTLVTVSS

SEQ ID NO: 673 - protein, 221 aa, Artificial Sequence
  Description of Artificial Sequence: Synthetic polypeptide
AIQMTQSSSSFSVSLGDRVTITCKASEDIYNRFAWYQQKPGNAPRLLISGAASLEAGVPSRFSGSGSGQDYTLSITSLQTEDVATYYCQQYWSTPWTFGGGTKLEIKRTVAAPDIQMTQSPSSLSASVGDRVTITCSASQDISNYLNWYQQKPGKAPKVLIYFTSSLHSGVPSRFSGSGSGTDFTLTISSLQPEDFATYYCQQYSTVPWTFGQGTKVEIKR

SEQ ID NO: 674 - protein, 245 aa, Artificial Sequence
  Description of Artificial Sequence: Synthetic polypeptide
EVQLVESGGGLVQPGGSLRLSCAASGYTFTNYGMNWVRQAPGKGLEWVGWINTYTGEPTYAADFKRRFTFSLDTSKSTAYLQMNSLRAEDTAVYYCAKYPHYYGSSHWYFDVWGQGTLVTVSSASTKGPQVQLKQSGPGLVQPSQSLSITCTVSGFSLTTYGIHWVRQSPGKGLEWLGVMWSGGDTDYDAAFISRLSISKDNSKSQVFFKMNSLQANDTGIYYCARYRFYGMDYWGQGTSVTVSS

SEQ ID NO: 675 - protein, 221 aa, Artificial Sequence
  Description of Artificial Sequence: Synthetic polypeptide
DIQMTQSPSSLSASVGDRVTITCSASQDISNYLNWYQQKPGKAPKVLIYFTSSLHSGVPSRFSGSGSGTDFTLTISSLQPEDFATYYCQQYSTVPWTFGQGTKVEIKRTVAAPAIQMTQSSSSFSVSLGDRVTITCKASEDIYNRFAWYQQKPGNAPRLLISGAASLEAGVPSRFSGSGSGQDYTLSITSLQTEDVATYYCQQYWSTPWTFGGGTKLEIKR

SEQ ID NO: 676 - protein, 252 aa, Artificial Sequence
  Description of Artificial Sequence: Synthetic polypeptide
QVQLKQSGPGLVQPSQSLSITCTVSGFSLTTYGIHWVRQSPGKGLEWLGVMWSGGDTDYDAAFISRLSISKDNSKSQVFFKMNSLQANDTGIYYCARYRFYGMDYWGQGTSVTVSSASTKGPSVFPLAPEVQLVESGGGLVQPGGSLRLSCAASGYTFTNYGMNWVRQAPGKGLEWVGWINTYTGEPTYAADFKRRFTFSLDTSKSTAYLQMNSLRAEDTAVYYCAKYPHYYGSSHWYFDVWGQGTLVTVSS

SEQ ID NO: 677 - protein, 228 aa, Artificial Sequence
  Description of Artificial Sequence: Synthetic polypeptide
AIQMTQSSSSFSVSLGDRVTITCKASEDIYNRFAWYQQKPGNAPRLLISGAASLEAGVPSRFSGSGSGQDYTLSITSLQTEDVATYYCQQYWSTPWTFGGGTKLEIKRTVAAPSVFIFPPDIQMTQSPSSLSASVGDRVTITCSASQDISNYLNWYQQKPGKAPKVLIYFTSSLHSGVPSRFSGSGSGTDFTLTISSLQPEDFATYYCQQYSTVPWTFGQGTKVEIKR

SEQ ID NO: 678 - protein, 252 aa, Artificial Sequence
  Description of Artificial Sequence: Synthetic polypeptide
EVQLVESGGGLVQPGGSLRLSCAASGYTFTNYGMNWVRQAPGKGLEWVGWINTYTGEPTYAADFKRRFTFSLDTSKSTAYLQMNSLRAEDTAVYYCAKYPHYYGSSHWYFDVWGQGTLVTVSSASTKGPSVFPLAPQVQLKQSGPGLVQPSQSLSITCTVSGFSLTTYGIHWVRQSPGKGLEWLGVMWSGGDTDYDAAFISRLSISKDNSKSQVFFKMNSLQANDTGIYYCARYRFYGMDYWGQGTSVTVSS

SEQ ID NO: 679 - protein, 228 aa, Artificial Sequence
  Description of Artificial Sequence: Synthetic polypeptide
DIQMTQSPSSLSASVGDRVTITCSASQDISNYLNWYQQKPGKAPKVLIYFTSSLHSGVPSRFSGSGSGTDFTLTISSLQPEDFATYYCQQYSTVPWTFGQGTKVEIKRTVAAPSVFIFPPAIQMTQSSSSFSVSLGDRVTITCKASEDIYNRFAWYQQKPGNAPRLLISGAASLEAGVPSRFSGSGSGQDYTLSITSLQTEDVATYYCQQYWSTPWTFGGGTKLEIKR

SEQ ID NO: 680 - protein, 252 aa, Artificial Sequence; identical to SEQ ID NO: 676
  Description of Artificial Sequence: Synthetic polypeptide

SEQ ID NO: 681 - protein, 221 aa, Artificial Sequence; identical to SEQ ID NO: 673
  Description of Artificial Sequence: Synthetic polypeptide

SEQ ID NO: 682 - protein, 252 aa, Artificial Sequence; identical to SEQ ID NO: 678
  Description of Artificial Sequence: Synthetic polypeptide

SEQ ID NO: 683 - protein, 221 aa, Artificial Sequence; identical to SEQ ID NO: 675
  Description of Artificial Sequence: Synthetic polypeptide

SEQ ID NO: 684 - protein, 245 aa, Artificial Sequence; identical to SEQ ID NO: 672
  Description of Artificial Sequence: Synthetic polypeptide

SEQ ID NO: 685 - protein, 228 aa, Artificial Sequence; identical to SEQ ID NO: 677
  Description of Artificial Sequence: Synthetic polypeptide

SEQ ID NO: 686 - protein, 245 aa, Artificial Sequence; identical to SEQ ID NO: 674
  Description of Artificial Sequence: Synthetic polypeptide

SEQ ID NO: 687 - protein, 228 aa, Artificial Sequence; identical to SEQ ID NO: 679
  Description of Artificial Sequence: Synthetic polypeptide

SEQ ID NO: 688 - protein, 242 aa, Artificial Sequence
  Description of Artificial Sequence: Synthetic polypeptide
QVQLKQSGPGLVQPSQSLSITCTVSGFSLTTYGIHWVRQSPGKGLEWLGVMWSGGDTDYDAAFISRLSISKDNSKSQVFFKMNSLQANDTGIYYCARYRFYGMDYWGQGTSVTVSSASTKGPEVQLVESGGGLVQPGGSLRLSCAASGFTISDYWIHWVRQAPGKGLEWVAGITPAGGYTYYADSVKGRFTISADTSKNTAYLQMNSLRAEDTAVYYCARFVFFLPYAMDYWGQGTLVTVSS

SEQ ID NO: 689 - protein, 221 aa, Artificial Sequence
  Description of Artificial Sequence: Synthetic polypeptide
AIQMTQSSSSFSVSLGDRVTITCKASEDIYNRFAWYQQKPGNAPRLLISGAASLEAGVPSRFSGSGSGQDYTLSITSLQTEDVATYYCQQYWSTPWTFGGGTKLEIKRTVAAPDIQMTQSPSSLSASVGDRVTITCRASQDVSTAVAWYQQKPGKAPKLLIYSASFLYSGVPSRFSGSGSGTDFTLTISSLQPEDFATYYCQQSYTTPPTFGQGTKVEIKR

SEQ ID NO: 690 - protein, 242 aa, Artificial Sequence
  Description of Artificial Sequence: Synthetic polypeptide
EVQLVESGGGLVQPGGSLRLSCAASGFTISDYWIHWVRQAPGKGLEWVAGITPAGGYTYYADSVKGRFTISADTSKNTAYLQMNSLRAEDTAVYYCARFVFFLPYAMDYWGQGTLVTVSSASTKGPQVQLKQSGPGLVQPSQSLSITCTVSGFSLTTYGIHWVRQSPGKGLEWLGVMWSGGDTDYDAAFISRLSISKDNSKSQVFFKMNSLQANDTGIYYCARYRFYGMDYWGQGTSVTVSS

SEQ ID NO: 691 - protein, 221 aa, Artificial Sequence
  Description of Artificial Sequence: Synthetic polypeptide
DIQMTQSPSSLSASVGDRVTITCRASQDVSTAVAWYQQKPGKAPKLLIYSASFLYSGVPSRFSGSGSGTDFTLTISSLQPEDFATYYCQQSYTTPPTFGQGTKVEIKRTVAAPAIQMTQSSSSFSVSLGDRVTITCKASEDIYNRFAWYQQKPGNAPRLLISGAASLEAGVPSRFSGSGSGQDYTLSITSLQTEDVATYYCQQYWSTPWTFGGGTKLEIKR

SEQ ID NO: 692 - protein, 249 aa, Artificial Sequence
  Description of Artificial Sequence: Synthetic polypeptide
QVQLKQSGPGLVQPSQSLSITCTVSGFSLTTYGIHWVRQSPGKGLEWLGVMWSGGDTDYDAAFISRLSISKDNSKSQVFFKMNSLQANDTGIYYCARYRFYGMDYWGQGTSVTVSSASTKGPSVFPLAPEVQLVESGGGLVQPGGSLRLSCAASGFTISDYWIHWVRQAPGKGLEWVAGITPAGGYTYYADSVKGRFTISADTSKNTAYLQMNSLRAEDTAVYYCARFVFFLPYAMDYWGQGTLVTVSS

SEQ ID NO: 693 - protein, 228 aa, Artificial Sequence
  Description of Artificial Sequence: Synthetic polypeptide
AIQMTQSSSSFSVSLGDRVTITCKASEDIYNRFAWYQQKPGNAPRLLISGAASLEAGVPSRFSGSGSGQDYTLSITSLQTEDVATYYCQQYWSTPWTFGGGTKLEIKRTVAAPSVFIFPPDIQMTQSPSSLSASVGDRVTITCRASQDVSTAVAWYQQKPGKAPKLLIYSASFLYSGVPSRFSGSGSGTDFTLTISSLQPEDFATYYCQQSYTTPPTFGQGTKVEIKR

SEQ ID NO: 694 - protein, 249 aa, Artificial Sequence
  Description of Artificial Sequence: Synthetic polypeptide
EVQLVESGGGLVQPGGSLRLSCAASGFTISDYWIHWVRQAPGKGLEWVAGITPAGGYTYYADSVKGRFTISADTSKNTAYLQMNSLRAEDTAVYYCARFVFFLPYAMDYWGQGTLVTVSSASTKGPSVFPLAPQVQLKQSGPGLVQPSQSLSITCTVSGFSLTTYGIHWVRQSPGKGLEWLGVMWSGGDTDYDAAFISRLSISKDNSKSQVFFKMNSLQANDTGIYYCARYRFYGMDYWGQGTSVTVSS

SEQ ID NO: 695 - protein, 228 aa, Artificial Sequence
  Description of Artificial Sequence: Synthetic polypeptide
DIQMTQSPSSLSASVGDRVTITCRASQDVSTAVAWYQQKPGKAPKLLIYSASFLYSGVPSRFSGSGSGTDFTLTISSLQPEDFATYYCQQSYTTPPTFGQGTKVEIKRTVAAPSVFIFPPAIQMTQSSSSFSVSLGDRVTITCKASEDIYNRFAWYQQKPGNAPRLLISGAASLEAGVPSRFSGSGSGQDYTLSITSLQTEDVATYYCQQYWSTPWTFGGGTKLEIKR

SEQ ID NO: 696 - protein, 249 aa, Artificial Sequence; identical to SEQ ID NO: 692
  Description of Artificial Sequence: Synthetic polypeptide

SEQ ID NO: 697 - protein, 221 aa, Artificial Sequence; identical to SEQ ID NO: 689
  Description of Artificial Sequence: Synthetic polypeptide

SEQ ID NO: 698 - protein, 249 aa, Artificial Sequence; identical to SEQ ID NO: 694
  Description of Artificial Sequence: Synthetic polypeptide

SEQ ID NO: 699 - protein, 221 aa, Artificial Sequence; identical to SEQ ID NO: 691
  Description of Artificial Sequence: Synthetic polypeptide

SEQ ID NO: 700 - protein, 242 aa, Artificial Sequence; identical to SEQ ID NO: 688
  Description of Artificial Sequence: Synthetic polypeptide

SEQ ID NO: 701 - protein, 228 aa, Artificial Sequence; identical to SEQ ID NO: 693
  Description of Artificial Sequence: Synthetic polypeptide

SEQ ID NO: 702 - protein, 242 aa, Artificial Sequence; identical to SEQ ID NO: 690
  Description of Artificial Sequence: Synthetic polypeptide

SEQ ID NO: 703 - protein, 228 aa, Artificial Sequence; identical to SEQ ID NO: 695
  Description of Artificial Sequence: Synthetic polypeptide

SEQ ID NO: 704 - protein, 243 aa, Artificial Sequence
  Description of Artificial Sequence: Synthetic polypeptide
QVQLKQSGPGLVQPSQSLSITCTVSGFSLTTYGIHWVRQSPGKGLEWLGVMWSGGDTDYDAAFISRLSISKDNSKSQVFFKMNSLQANDTGIYYCARYRFYGMDYWGQGTSVTVSSASTKGPEVQLVESGGGLVQPGGSLRLSCAASGFTINASWIHWVRQAPGKGLEWVGAIYPYSGYTNYADSVKGRFTISADTSKNTAYLQMNSLRAEDTAVYYCARWGHSTSPWAMDYWGQGTLVTVSS

SEQ ID NO: 705 - protein, 221 aa, Artificial Sequence
  Description of Artificial Sequence: Synthetic polypeptide
AIQMTQSSSSFSVSLGDRVTITCKASEDIYNRFAWYQQKPGNAPRLLISGAASLEAGVPSRFSGSGSGQDYTLSITSLQTEDVATYYCQQYWSTPWTFGGGTKLEIKRTVAAPDIQMTQSPSSLSASVGDRVTITCRASQVIRRSLAWYQQKPGKAPKLLIYAASNLASGVPSRFSGSGSGTDFTLTISSLQPEDFATYYCQQSNTSPLTFGQGTKVEIKR

SEQ ID NO: 706 - protein, 243 aa, Artificial Sequence
  Description of Artificial Sequence: Synthetic polypeptide
EVQLVESGGGLVQPGGSLRLSCAASGFTINASWIHWVRQAPGKGLEWVGAIYPYSGYTNYADSVKGRFTISADTSKNTAYLQMNSLRAEDTAVYYCARWGHSTSPWAMDYWGQGTLVTVSSASTKGPQVQLKQSGPGLVQPSQSLSITCTVSGFSLTTYGIHWVRQSPGKGLEWLGVMWSGGDTDYDAAFISRLSISKDNSKSQVFFKMNSLQANDTGIYYCARYRFYGMDYWGQGTSVTVSS

SEQ ID NO: 707 - protein, 221 aa, Artificial Sequence
  Description of Artificial Sequence: Synthetic polypeptide
DIQMTQSPSSLSASVGDRVTITCRASQVIRRSLAWYQQKPGKAPKLLIYAASNLASGVPSRFSGSGSGTDFTLTISSLQPEDFATYYCQQSNTSPLTFGQGTKVEIKRTVAAPAIQMTQSSSSFSVSLGDRVTITCKASEDIYNRFAWYQQKPGNAPRLLISGAASLEAGVPSRFSGSGSGQDYTLSITSLQTEDVATYYCQQYWSTPWTFGGGTKLEIKR

SEQ ID NO: 708 - protein, 250 aa, Artificial Sequence
  Description of Artificial Sequence: Synthetic polypeptide
QVQLKQSGPGLVQPSQSLSITCTVSGFSLTTYGIHWVRQSPGKGLEWLGVMWSGGDTDYDAAFISRLSISKDNSKSQVFFKMNSLQANDTGIYYCARYRFYGMDYWGQGTSVTVSSASTKGPSVFPLAPEVQLVESGGGLVQPGGSLRLSCAASGFTINASWIHWVRQAPGKGLEWVGAIYPYSGYTNYADSVKGRFTISADTSKNTAYLQMNSLRAEDTAVYYCARWGHSTSPWAMDYWGQGTLVTVSS

SEQ ID NO: 709 - protein, 228 aa, Artificial Sequence
  Description of Artificial Sequence: Synthetic polypeptide
AIQMTQSSSSFSVSLGDRVTITCKASEDIYNRFAWYQQKPGNAPRLLISGAASLEAGVPSRFSGSGSGQDYTLSITSLQTEDVATYYCQQYWSTPWTFGGGTKLEIKRTVAAPSVFIFPPDIQMTQSPSSLSASVGDRVTITCRASQVIRRSLAWYQQKPGKAPKLLIYAASNLASGVPSRFSGSGSGTDFTLTISSLQPEDFATYYCQQSNTSPLTFGQGTKVEIKR

SEQ ID NO: 710 - protein, 250 aa, Artificial Sequence
  Description of Artificial Sequence: Synthetic polypeptide
EVQLVESGGGLVQPGGSLRLSCAASGFTINASWIHWVRQAPGKGLEWVGAIYPYSGYTNYADSVKGRFTISADTSKNTAYLQMNSLRAEDTAVYYCARWGHSTSPWAMDYWGQGTLVTVSSASTKGPSVFPLAPQVQLKQSGPGLVQPSQSLSITCTVSGFSLTTYGIHWVRQSPGKGLEWLGVMWSGGDTDYDAAFISRLSISKDNSKSQVFFKMNSLQANDTGIYYCARYRFYGMDYWGQGTSVTVSS

SEQ ID NO: 711 - protein, 228 aa, Artificial Sequence
  Description of Artificial Sequence: Synthetic polypeptide
DIQMTQSPSSLSASVGDRVTITCRASQVIRRSLAWYQQKPGKAPKLLIYAASNLASGVPSRFSGSGSGTDFTLTISSLQPEDFATYYCQQSNTSPLTFGQGTKVEIKRTVAAPSVFIFPPAIQMTQSSSSFSVSLGDRVTITCKASEDIYNRFAWYQQKPGNAPRLLISGAASLEAGVPSRFSGSGSGQDYTLSITSLQTEDVATYYCQQYWSTPWTFGGGTKLEIKR

SEQ ID NO: 712 - protein, 250 aa, Artificial Sequence; identical to SEQ ID NO: 708
  Description of Artificial Sequence: Synthetic polypeptide

SEQ ID NO: 713 - protein, 221 aa, Artificial Sequence; identical to SEQ ID NO: 705
  Description of Artificial Sequence: Synthetic polypeptide

SEQ ID NO: 714 - protein, 250 aa, Artificial Sequence; identical to SEQ ID NO: 710
  Description of Artificial Sequence: Synthetic polypeptide

SEQ ID NO: 715 - protein, 221 aa, Artificial Sequence; identical to SEQ ID NO: 707
  Description of Artificial Sequence: Synthetic polypeptide

SEQ ID NO: 716 - protein, 243 aa, Artificial Sequence; identical to SEQ ID NO: 704
  Description of Artificial Sequence: Synthetic polypeptide

SEQ ID NO: 717 - protein, 228 aa, Artificial Sequence; identical to SEQ ID NO: 709
  Description of Artificial Sequence: Synthetic polypeptide

SEQ ID NO: 718 - protein, 243 aa, Artificial Sequence; identical to SEQ ID NO: 706
  Description of Artificial Sequence: Synthetic polypeptide

SEQ ID NO: 719 - protein, 228 aa, Artificial Sequence; identical to SEQ ID NO: 711
  Description of Artificial Sequence: Synthetic polypeptide

SEQ ID NO: 720 - protein, 242 aa, Artificial Sequence
  Description of Artificial Sequence: Synthetic polypeptide
QVQLKQSGPGLVQPSQSLSITCTVSGFSLTTYGIHWVRQSPGKGLEWLGVMWSGGDTDYDAAFISRLSISKDNSKSQVFFKMNSLQANDTGIYYCARYRFYGMDYWGQGTSVTVSSASTKGPEVQLVESGGGLVQPGGSLRLSCAASGFNIKDTYIHWVRQAPGKGLEWVARIYPTNGYTRYADSVKGRFTISADTSKNTAYLQMNSLRAEDTAVYYCSRWGGDGFYAMDYWGQGTLVTVSS

SEQ ID NO: 721 - protein, 221 aa, Artificial Sequence
  Description of Artificial Sequence: Synthetic polypeptide
AIQMTQSSSSFSVSLGDRVTITCKASEDIYNRFAWYQQKPGNAPRLLISGAASLEAGVPSRFSGSGSGQDYTLSITSLQTEDVATYYCQQYWSTPWTFGGGTKLEIKRTVAAPDIQMTQSPSSLSASVGDRVTITCRASQDVNTAVAWYQQKPGKAPKLLIYSASFLYSGVPSRFSGSRSGTDFTLTISSLQPEDFATYYCQQHYTTPPTFGQGTKVEIKR

SEQ ID NO: 722 - protein, 242 aa, Artificial Sequence
  Description of Artificial Sequence: Synthetic polypeptide
EVQLVESGGGLVQPGGSLRLSCAASGFNIKDTYIHWVRQAPGKGLEWVARIYPTNGYTRYADSVKGRFTISADTSKNTAYLQMNSLRAEDTAVYYCSRWGGDGFYAMDYWGQGTLVTVSSASTKGPQVQLKQSGPGLVQPSQSLSITCTVSGFSLTTYGIHWVRQSPGKGLEWLGVMWSGGDTDYDAAFISRLSISKDNSKSQVFFKMNSLQANDTGIYYCARYRFYGMDYWGQGTSVTVSS

SEQ ID NO: 723 - protein, 221 aa, Artificial Sequence
  Description of Artificial Sequence: Synthetic polypeptide
DIQMTQSPSSLSASVGDRVTITCRASQDVNTAVAWYQQKPGKAPKLLIYSASFLYSGVPSRFSGSRSGTDFTLTISSLQPEDFATYYCQQHYTTPPTFGQGTKVEIKRTVAAPAIQMTQSSSSFSVSLGDRVTITCKASEDIYNRFAWYQQKPGNAPRLLISGAASLEAGVPSRFSGSGSGQDYTLSITSLQTEDVATYYCQQYWSTPWTFGGGTKLEIKR

SEQ ID NO: 724 - protein, 249 aa, Artificial Sequence
  Description of Artificial Sequence: Synthetic polypeptide
QVQLKQSGPGLVQPSQSLSITCTVSGFSLTTYGIHWVRQSPGKGLEWLGVMWSGGDTDYDAAFISRLSISKDNSKSQVFFKMNSLQANDTGIYYCARYRFYGMDYWGQGTSVTVSSASTKGPSVFPLAPEVQLVESGGGLVQPGGSLRLSCAASGFNIKDTYIHWVRQAPGKGLEWVARIYPTNGYTRYADSVKGRFTISADTSKNTAYLQMNSLRAEDTAVYYCSRWGGDGFYAMDYWGQGTLVTVSS

SEQ ID NO: 725 - protein, 228 aa, Artificial Sequence
  Description of Artificial Sequence: Synthetic polypeptide
AIQMTQSSSSFSVSLGDRVTITCKASEDIYNRFAWYQQKPGNAPRLLISGAASLEAGVPSRFSGSGSGQDYTLSITSLQTEDVATYYCQQYWSTPWTFGGGTKLEIKRTVAAPSVFIFPPDIQMTQSPSSLSASVGDRVTITCRASQDVNTAVAWYQQKPGKAPKLLIYSASFLYSGVPSRFSGSRSGTDFTLTISSLQPEDFATYYCQQHYTTPPTFGQGTKVEIKR

SEQ ID NO: 726 - protein, 249 aa, Artificial Sequence
  Description of Artificial Sequence: Synthetic polypeptide
EVQLVESGGGLVQPGGSLRLSCAASGFNIKDTYIHWVRQAPGKGLEWVARIYPTNGYTRYADSVKGRFTISADTSKNTAYLQMNSLRAEDTAVYYCSRWGGDGFYAMDYWGQGTLVTVSSASTKGPSVFPLAPQVQLKQSGPGLVQPSQSLSITCTVSGFSLTTYGIHWVRQSPGKGLEWLGVMWSGGDTDYDAAFISRLSISKDNSKSQVFFKMNSLQANDTGIYYCARYRFYGMDYWGQGTSVTVSS

SEQ ID NO: 727 - protein, 228 aa, Artificial Sequence
  Description of Artificial Sequence: Synthetic polypeptide
DIQMTQSPSSLSASVGDRVTITCRASQDVNTAVAWYQQKPGKAPKLLIYSASFLYSGVPSRFSGSRSGTDFTLTISSLQPEDFATYYCQQHYTTPPTFGQGTKVEIKRTVAAPSVFIFPPAIQMTQSSSSFSVSLGDRVTITCKASEDIYNRFAWYQQKPGNAPRLLISGAASLEAGVPSRFSGSGSGQDYTLSITSLQTEDVATYYCQQYWSTPWTFGGGTKLEIKR

SEQ ID NO: 728 - protein, 249 aa, Artificial Sequence; identical to SEQ ID NO: 724
  Description of Artificial Sequence: Synthetic polypeptide

SEQ ID NO: 729 - protein, 221 aa, Artificial Sequence; identical to SEQ ID NO: 721
  Description of Artificial Sequence: Synthetic polypeptide

SEQ ID NO: 730 - protein, 249 aa, Artificial Sequence; identical to SEQ ID NO: 726
  Description of Artificial Sequence: Synthetic polypeptide

SEQ ID NO: 731 - protein, 221 aa, Artificial Sequence; identical to SEQ ID NO: 723
  Description of Artificial Sequence: Synthetic polypeptide

SEQ ID NO: 732 - protein, 242 aa, Artificial Sequence; identical to SEQ ID NO: 720
  Description of Artificial Sequence: Synthetic polypeptide

SEQ ID NO: 733 - protein, 228 aa, Artificial Sequence; identical to SEQ ID NO: 725
  Description of Artificial Sequence: Synthetic polypeptide

SEQ ID NO: 734 - protein, 242 aa, Artificial Sequence; identical to SEQ ID NO: 722
  Description of Artificial Sequence: Synthetic polypeptide

SEQ ID NO: 735 - protein, 228 aa, Artificial Sequence; identical to SEQ ID NO: 727
  Description of Artificial Sequence: Synthetic polypeptide

SEQ ID NO: 736 - protein, 242 aa, Artificial Sequence
  Description of Artificial Sequence: Synthetic polypeptide
QVQLQQSGAELVKPGASVKISCKASGYTFTDYYINWVKLAPGQGLEWIGWIYPGSGNTKYNEKFKGKATLTIDTSSSTAYMQLSSLTSEDTAVYFCVRDSPFFDYWGQGTLLTVSSASTKGPEVQLVESGGGLVQPGGSLRLSCAASGFTISDYWIHWVRQAPGKGLEWVAGITPAGGYTYYADSVKGRFTISADTSKNTAYLQMNSLRAEDTAVYYCARFVFFLPYAMDYWGQGTLVTVSS

SEQ ID NO: 737 - protein, 226 aa, Artificial Sequence
  Description of Artificial Sequence: Synthetic polypeptide
DIVLTQSPDSLAVSLGERVTMNCKSSQSLLNSGMRKSFLAWYQQKPGQSPKLLIYWASTRESGVPDRFTGSGSGTDFTLTISSVQAEDVAVYYCKQSYHLFTFGSGTKLEIKRTVAAPDIQMTQSPSSLSASVGDRVTITCRASQDVSTAVAWYQQKPGKAPKLLIYSASFLYSGVPSRFSGSGSGTDFTLTISSLQPEDFATYYCQQSYTTPPTFGQGTKVEIKR

SEQ ID NO: 738 - protein, 242 aa, Artificial Sequence
  Description of Artificial Sequence: Synthetic polypeptide
EVQLVESGGGLVQPGGSLRLSCAASGFTISDYWIHWVRQAPGKGLEWVAGITPAGGYTYYADSVKGRFTISADTSKNTAYLQMNSLRAEDTAVYYCARFVFFLPYAMDYWGQGTLVTVSSASTKGPQVQLQQSGAELVKPGASVKISCKASGYTFTDYYINWVKLAPGQGLEWIGWIYPGSGNTKYNEKFKGKATLTIDTSSSTAYMQLSSLTSEDTAVYFCVRDSPFFDYWGQGTLLTVSS

SEQ ID NO: 739 - protein, 226 aa, Artificial Sequence
  Description of Artificial Sequence: Synthetic polypeptide
DIQMTQSPSSLSASVGDRVTITCRASQDVSTAVAWYQQKPGKAPKLLIYSASFLYSGVPSRFSGSGSGTDFTLTISSLQPEDFATYYCQQSYTTPPTFGQGTKVEIKRTVAAPDIVLTQSPDSLAVSLGERVTMNCKSSQSLLNSGMRKSFLAWYQQKPGQSPKLLIYWASTRESGVPDRFTGSGSGTDFTLTISSVQAEDVAVYYCKQSYHLFTFGSGTKLEIKR

SEQ ID NO: 740 - protein, 249 aa, Artificial Sequence
  Description of Artificial Sequence: Synthetic polypeptide
QVQLQQSGAELVKPGASVKISCKASGYTFTDYYINWVKLAPGQGLEWIGWIYPGSGNTKYNEKFKGKATLTIDTSSSTAYMQLSSLTSEDTAVYFCVRDSPFFDYWGQGTLLTVSSASTKGPSVFPLAPEVQLVESGGGLVQPGGSLRLSCAASGFTISDYWIHWVRQAPGKGLEWVAGITPAGGYTYYADSVKGRFTISADTSKNTAYLQMNSLRAEDTAVYYCARFVFFLPYAMDYWGQGTLVTVSS

SEQ ID NO: 741 - protein, 233 aa, Artificial Sequence
  Description of Artificial Sequence: Synthetic polypeptide
DIVLTQSPDSLAVSLGERVTMNCKSSQSLLNSGMRKSFLAWYQQKPGQSPKLLIYWASTRESGVPDRFTGSGSGTDFTLTISSVQAEDVAVYYCKQSYHLFTFGSGTKLEIKRTVAAPSVFIFPPDIQMTQSPSSLSASVGDRVTITCRASQDVSTAVAWYQQKPGKAPKLLIYSASFLYSGVPSRFSGSGSGTDFTLTISSLQPEDFATYYCQQSYTTPPTFGQGTKVEIKR

SEQ ID NO: 742 - protein, 249 aa, Artificial Sequence
  Description of Artificial Sequence: Synthetic polypeptide
EVQLVESGGGLVQPGGSLRLSCAASGFTISDYWIHWVRQAPGKGLEWVAGITPAGGYTYYADSVKGRFTISADTSKNTAYLQMNSLRAEDTAVYYCARFVFFLPYAMDYWGQGTLVTVSSASTKGPSVFPLAPQVQLQQSGAELVKPGASVKISCKASGYTFTDYYINWVKLAPGQGLEWIGWIYPGSGNTKYNEKFKGKATLTIDTSSSTAYMQLSSLTSEDTAVYFCVRDSPFFDYWGQGTLLTVSS

SEQ ID NO: 743 - protein, 233 aa, Artificial Sequence
  Description of Artificial Sequence: Synthetic polypeptide
DIQMTQSPSSLSASVGDRVTITCRASQDVSTAVAWYQQKPGKAPKLLIYSASFLYSGVPSRFSGSGSGTDFTLTISSLQPEDFATYYCQQSYTTPPTFGQGTKVEIKRTVAAPSVFIFPPDIVLTQSPDSLAVSLGERVTMNCKSSQSLLNSGMRKSFLAWYQQKPGQSPKLLIYWASTRESGVPDRFTGSGSGTDFTLTISSVQAEDVAVYYCKQSYHLFTFGSGTKLEIKR

SEQ ID NO: 744 - protein, 249 aa, Artificial Sequence; identical to SEQ ID NO: 740
  Description of Artificial Sequence: Synthetic polypeptide

SEQ ID NO: 745 - protein, 226 aa, Artificial Sequence; identical to SEQ ID NO: 737
  Description of Artificial Sequence: Synthetic polypeptide

SEQ ID NO: 746 - protein, 249 aa, Artificial Sequence; identical to SEQ ID NO: 742
  Description of Artificial Sequence: Synthetic polypeptide

SEQ ID NO: 747 - protein, 226 aa, Artificial Sequence; identical to SEQ ID NO: 739
  Description of Artificial Sequence: Synthetic polypeptide

SEQ ID NO: 748 - protein, 242 aa, Artificial Sequence; identical to SEQ ID NO: 736
  Description of Artificial Sequence: Synthetic polypeptide

SEQ ID NO: 749 - protein, 233 aa, Artificial Sequence; identical to SEQ ID NO: 741
  Description of Artificial Sequence: Synthetic polypeptide

SEQ ID NO: 750 - protein, 242 aa, Artificial Sequence; identical to SEQ ID NO: 738
  Description of Artificial Sequence: Synthetic polypeptide

SEQ ID NO: 751 - protein, 233 aa, Artificial Sequence; identical to SEQ ID NO: 743
  Description of Artificial Sequence: Synthetic polypeptide

SEQ ID NO: 752 - protein, 243 aa, Artificial Sequence
  Description of Artificial Sequence: Synthetic polypeptide
QVQLQQSGAELVKPGASVKISCKASGYTFTDYYINWVKLAPGQGLEWIGWIYPGSGNTKYNEKFKGKATLTIDTSSSTAYMQLSSLTSEDTAVYFCVRDSPFFDYWGQGTLLTVSSASTKGPEVQLVESGGGLVQPGGSLRLSCAASGFTINASWIHWVRQAPGKGLEWVGAIYPYSGYTNYADSVKGRFTISADTSKNTAYLQMNSLRAEDTAVYYCARWGHSTSPWAMDYWGQGTLVTVSS

SEQ ID NO: 753 - protein, 226 aa, Artificial Sequence
  Description of Artificial Sequence: Synthetic polypeptide
DIVLTQSPDSLAVSLGERVTMNCKSSQSLLNSGMRKSFLAWYQQKPGQSPKLLIYWASTRESGVPDRFTGSGSGTDFTLTISSVQAEDVAVYYCKQSYHLFTFGSGTKLEIKRTVAAPDIQMTQSPSSLSASVGDRVTITCRASQVIRRSLAWYQQKPGKAPKLLIYAASNLASGVPSRFSGSGSGTDFTLTISSLQPEDFATYYCQQSNTSPLTFGQGTKVEIKR

SEQ ID NO: 754 - protein, 243 aa, Artificial Sequence
  Description of Artificial Sequence: Synthetic polypeptide
EVQLVESGGGLVQPGGSLRLSCAASGFTINASWIHWVRQAPGKGLEWVGAIYPYSGYTNYADSVKGRFTISADTSKNTAYLQMNSLRAEDTAVYYCARWGHSTSPWAMDYWGQGTLVTVSSASTKGPQVQLQQSGAELVKPGASVKISCKASGYTFTDYYINWVKLAPGQGLEWIGWIYPGSGNTKYNEKFKGKATLTIDTSSSTAYMQLSSLTSEDTAVYFCVRDSPFFDYWGQGTLLTVSS

SEQ ID NO: 755 - protein, 226 aa, Artificial Sequence
  Description of Artificial Sequence: Synthetic polypeptide
DIQMTQSPSSLSASVGDRVTITCRASQVIRRSLAWYQQKPGKAPKLLIYAASNLASGVPSRFSGSGSGTDFTLTISSLQPEDFATYYCQQSNTSPLTFGQGTKVEIKRTVAAPDIVLTQSPDSLAVSLGERVTMNCKSSQSLLNSGMRKSFLAWYQQKPGQSPKLLIYWASTRESGVPDRFTGSGSGTDFTLTISSVQAEDVAVYYCKQSYHLFTFGSGTKLEIKR

SEQ ID NO: 756 - protein, 250 aa, Artificial Sequence
  Description of Artificial Sequence: Synthetic polypeptide
QVQLQQSGAELVKPGASVKISCKASGYTFTDYYINWVKLAPGQGLEWIGWIYPGSGNTKYNEKFKGKATLTIDTSSSTAYMQLSSLTSEDTAVYFCVRDSPFFDYWGQGTLLTVSSASTKGPSVFPLAPEVQLVESGGGLVQPGGSLRLSCAASGFTINASWIHWVRQAPGKGLEWVGAIYPYSGYTNYADSVKGRFTISADTSKNTAYLQMNSLRAEDTAVYYCARWGHSTSPWAMDYWGQGTLVTVSS

SEQ ID NO: 757 - protein, 233 aa, Artificial Sequence
  Description of Artificial Sequence: Synthetic polypeptide
DIVLTQSPDSLAVSLGERVTMNCKSSQSLLNSGMRKSFLAWYQQKPGQSPKLLIYWASTRESGVPDRFTGSGSGTDFTLTISSVQAEDVAVYYCKQSYHLFTFGSGTKLEIKRTVAAPSVFIFPPDIQMTQSPSSLSASVGDRVTITCRASQVIRRSLAWYQQKPGKAPKLLIYAASNLASGVPSRFSGSGSGTDFTLTISSLQPEDFATYYCQQSNTSPLTFGQGTKVEIKR

SEQ ID NO: 758 - protein, 250 aa, Artificial Sequence
  Description of Artificial Sequence: Synthetic polypeptide
EVQLVESGGGLVQPGGSLRLSCAASGFTINASWIHWVRQAPGKGLEWVGAIYPYSGYTNYADSVKGRFTISADTSKNTAYLQMNSLRAEDTAVYYCARWGHSTSPWAMDYWGQGTLVTVSSASTKGPSVFPLAPQVQLQQSGAELVKPGASVKISCKASGYTFTDYYINWVKLAPGQGLEWIGWIYPGSGNTKYNEKFKGKATLTIDTSSSTAYMQLSSLTSEDTAVYFCVRDSPFFDYWGQGTLLTVSS

SEQ ID NO: 759 - protein, 233 aa, Artificial Sequence
  Description of Artificial Sequence: Synthetic polypeptide
DIQMTQSPSSLSASVGDRVTITCRASQVIRRSLAWYQQKPGKAPKLLIYAASNLASGVPSRFSGSGSGTDFTLTISSLQPEDFATYYCQQSNTSPLTFGQGTKVEIKRTVAAPSVFIFPPDIVLTQSPDSLAVSLGERVTMNCKSSQSLLNSGMRKSFLAWYQQKPGQSPKLLIYWASTRESGVPDRFTGSGSGTDFTLTISSVQAEDVAVYYCKQSYHLFTFGSGTKLEIKR

SEQ ID NO: 760 - protein, 250 aa, Artificial Sequence; identical to SEQ ID NO: 756
  Description of Artificial Sequence: Synthetic polypeptide

SEQ ID NO: 761 - protein, 226 aa, Artificial Sequence; identical to SEQ ID NO: 753
  Description of Artificial Sequence: Synthetic polypeptide

SEQ ID NO: 762 - protein, 250 aa, Artificial Sequence; identical to SEQ ID NO: 758
  Description of Artificial Sequence: Synthetic polypeptide

SEQ ID NO: 763 - protein, 226 aa, Artificial Sequence; identical to SEQ ID NO: 755
  Description of Artificial Sequence: Synthetic polypeptide

SEQ ID NO: 764 - protein, 243 aa, Artificial Sequence; identical to SEQ ID NO: 752
  Description of Artificial Sequence: Synthetic polypeptide

SEQ ID NO: 765 - protein, 233 aa, Artificial Sequence; identical to SEQ ID NO: 757
  Description of Artificial Sequence: Synthetic polypeptide

SEQ ID NO: 766 - protein, 243 aa, Artificial Sequence; identical to SEQ ID NO: 754
  Description of Artificial Sequence: Synthetic polypeptide

SEQ ID NO: 767 - protein, 233 aa, Artificial Sequence; identical to SEQ ID NO: 759
  Description of Artificial Sequence: Synthetic polypeptide

SEQ ID NO: 768 - protein, 242 aa, Artificial Sequence
  Description of Artificial Sequence: Synthetic polypeptide
QVQLQQSGAELVKPGASVKISCKASGYTFTDYYINWVKLAPGQGLEWIGWIYPGSGNTKYNEKFKGKATLTIDTSSSTAYMQLSSLTSEDTAVYFCVRDSPFFDYWGQGTLLTVSSASTKGPEVQLVESGGGLVQPGGSLRLSCAASGFNIKDTYIHWVRQAPGKGLEWVARIYPTNGYTRYADSVKGRFTISADTSKNTAYLQMNSLRAEDTAVYYCSRWGGDGFYAMDYWGQGTLVTVSS

SEQ ID NO: 769 - protein, 226 aa, Artificial Sequence
  Description of Artificial Sequence: Synthetic polypeptide
DIVLTQSPDSLAVSLGERVTMNCKSSQSLLNSGMRKSFLAWYQQKPGQSPKLLIYWASTRESGVPDRFTGSGSGTDFTLTISSVQAEDVAVYYCKQSYHLFTFGSGTKLEIKRTVAAPDIQMTQSPSSLSASVGDRVTITCRASQDVNTAVAWYQQKPGKAPKLLIYSASFLYSGVPSRFSGSRSGTDFTLTISSLQPEDFATYYCQQHYTTPPTFGQGTKVEIKR

SEQ ID NO: 770 - protein, 242 aa, Artificial Sequence
  Description of Artificial Sequence: Synthetic polypeptide
EVQLVESGGGLVQPGGSLRLSCAASGFNIKDTYIHWVRQAPGKGLEWVARIYPTNGYTRYADSVKGRFTISADTSKNTAYLQMNSLRAEDTAVYYCSRWGGDGFYAMDYWGQGTLVTVSSASTKGPQVQLQQSGAELVKPGASVKISCKASGYTFTDYYINWVKLAPGQGLEWIGWIYPGSGNTKYNEKFKGKATLTIDTSSSTAYMQLSSLTSEDTAVYFCVRDSPFFDYWGQGTLLTVSS

SEQ ID NO: 771 - protein, 226 aa, Artificial Sequence
  Description of Artificial Sequence: Synthetic polypeptide
DIQMTQSPSSLSASVGDRVTITCRASQDVNTAVAWYQQKPGKAPKLLIYSASFLYSGVPSRFSGSRSGTDFTLTISSLQPEDFATYYCQQHYTTPPTFGQGTKVEIKRTVAAPDIVLTQSPDSLAVSLGERVTMNCKSSQSLLNSGMRKSFLAWYQQKPGQSPKLLIYWASTRESGVPDRFTGSGSGTDFTLTISSVQAEDVAVYYCKQSYHLFTFGSGTKLEIKR

SEQ ID NO: 772 - protein, 249 aa, Artificial Sequence
  Description of Artificial Sequence: Synthetic polypeptide
QVQLQQSGAELVKPGASVKISCKASGYTFTDYYINWVKLAPGQGLEWIGWIYPGSGNTKYNEKFKGKATLTIDTSSSTAYMQLSSLTSEDTAVYFCVRDSPFFDYWGQGTLLTVSSASTKGPSVFPLAPEVQLVESGGGLVQPGGSLRLSCAASGFNIKDTYIHWVRQAPGKGLEWVARIYPTNGYTRYADSVKGRFTISADTSKNTAYLQMNSLRAEDTAVYYCSRWGGDGFYAMDYWGQGTLVTVSS

SEQ ID NO: 773 - protein, 233 aa, Artificial Sequence
  Description of Artificial Sequence: Synthetic polypeptide
DIVLTQSPDSLAVSLGERVTMNCKSSQSLLNSGMRKSFLAWYQQKPGQSPKLLIYWASTRESGVPDRFTGSGSGTDFTLTISSVQAEDVAVYYCKQSYHLFTFGSGTKLEIKRTVAAPSVFIFPPDIQMTQSPSSLSASVGDRVTITCRASQDVNTAVAWYQQKPGKAPKLLIYSASFLYSGVPSRFSGSRSGTDFTLTISSLQPEDFATYYCQQHYTTPPTFGQGTKVEIKR

SEQ ID NO: 774 - protein, 249 aa, Artificial Sequence
  Description of Artificial Sequence: Synthetic polypeptide
EVQLVESGGGLVQPGGSLRLSCAASGFNIKDTYIHWVRQAPGKGLEWVARIYPTNGYTRYADSVKGRFTISADTSKNTAYLQMNSLRAEDTAVYYCSRWGGDGFYAMDYWGQGTLVTVSSASTKGPSVFPLAPQVQLQQSGAELVKPGASVKISCKASGYTFTDYYINWVKLAPGQGLEWIGWIYPGSGNTKYNEKFKGKATLTIDTSSSTAYMQLSSLTSEDTAVYFCVRDSPFFDYWGQGTLLTVSS

SEQ ID NO: 775 - protein, 233 aa, Artificial Sequence
  Description of Artificial Sequence: Synthetic polypeptide
DIQMTQSPSSLSASVGDRVTITCRASQDVNTAVAWYQQKPGKAPKLLIYSASFLYSGVPSRFSGSRSGTDFTLTISSLQPEDFATYYCQQHYTTPPTFGQGTKVEIKRTVAAPSVFIFPPDIVLTQSPDSLAVSLGERVTMNCKSSQSLLNSGMRKSFLAWYQQKPGQSPKLLIYWASTRESGVPDRFTGSGSGTDFTLTISSVQAEDVAVYYCKQSYHLFTFGSGTKLEIKR

SEQ ID NO: 776 - protein, 249 aa, Artificial Sequence; identical to SEQ ID NO: 772
  Description of Artificial Sequence: Synthetic polypeptide

SEQ ID NO: 777 - protein, 226 aa, Artificial Sequence; identical to SEQ ID NO: 769
  Description of Artificial Sequence: Synthetic polypeptide

SEQ ID NO: 778 - protein, 249 aa, Artificial Sequence; identical to SEQ ID NO: 774
  Description of Artificial Sequence: Synthetic polypeptide

SEQ ID NO: 779 - protein, 226 aa, Artificial Sequence; identical to SEQ ID NO: 771
  Description of Artificial Sequence: Synthetic polypeptide

SEQ ID NO: 780 - protein, 242 aa, Artificial Sequence; identical to SEQ ID NO: 768
  Description of Artificial Sequence: Synthetic polypeptide

SEQ ID NO: 781 - protein, 233 aa, Artificial Sequence; identical to SEQ ID NO: 773
  Description of Artificial Sequence: Synthetic polypeptide

SEQ ID NO: 782 - protein, 242 aa, Artificial Sequence; identical to SEQ ID NO: 770
  Description of Artificial Sequence: Synthetic polypeptide

SEQ ID NO: 783 - protein, 233 aa, Artificial Sequence; identical to SEQ ID NO: 775
  Description of Artificial Sequence: Synthetic polypeptide

SEQ ID NO: 784 - protein, 255 aa, Artificial Sequence
  Description of Artificial Sequence: Synthetic polypeptide
QVQLVESGGGLVKPGGSLRLSCAASGFTFSDYYMSWIRQAPGKGLEWVSYISSSGSTIYYADSVKGRFTISRDNAKNSLYLQMNSLRAEDTAVYYCARDEYNSGWYVLFDYWGQGTLVTVSSASTKGPSVFPLAPEVQLVESGGGLVQPGGSLRLSCAASGFTISDYWIHWVRQAPGKGLEWVAGITPAGGYTYYADSVKGRFTISADTSKNTAYLQMNSLRAEDTAVYYCARFVFFLPYAMDYWGQGTLVTVSS

SEQ ID NO: 785 - protein, 228 aa, Artificial Sequence
  Description of Artificial Sequence: Synthetic polypeptide
DIQMTQSPSSVSASVGDRVTITCRASQGISSWLAWYQQKPGKAPNLLIYEASSLQSGVPSRFGGSGSGTDFTLTISSLQPEDFATYYCQQANGFPWTFGQGTKVEIKRTVAAPSVFIFPPDIQMTQSPSSLSASVGDRVTITCRASQDVSTAVAWYQQKPGKAPKLLIYSASFLYSGVPSRFSGSGSGTDFTLTISSLQPEDFATYYCQQSYTTPPTFGQGTKVEIKR

SEQ ID NO: 786 - protein, 255 aa, Artificial Sequence
  Description of Artificial Sequence: Synthetic polypeptide
EVQLVESGGGLVQPGGSLRLSCAASGFTISDYWIHWVRQAPGKGLEWVAGITPAGGYTYYADSVKGRFTISADTSKNTAYLQMNSLRAEDTAVYYCARFVFFLPYAMDYWGQGTLVTVSSASTKGPSVFPLAPQVQLVESGGGLVKPGGSLRLSCAASGFTFSDYYMSWIRQAPGKGLEWVSYISSSGSTIYYADSVKGRFTISRDNAKNSLYLQMNSLRAEDTAVYYCARDEYNSGWYVLFDYWGQGTLVTVSS

SEQ ID NO: 787 - protein, 228 aa, Artificial Sequence
  Description of Artificial Sequence: Synthetic polypeptide
DIQMTQSPSSLSASVGDRVTITCRASQDVSTAVAWYQQKPGKAPKLLIYSASFLYSGVPSRFSGSGSGTDFTLTISSLQPEDFATYYCQQSYTTPPTFGQGTKVEIKRTVAAPSVFIFPPDIQMTQSPSSVSASVGDRVTITCRASQGISSWLAWYQQKPGKAPNLLIYEASSLQSGVPSRFGGSGSGTDFTLTISSLQPEDFATYYCQQANGFPWTFGQGTKVEIKR

SEQ ID NO: 788 - protein, 255 aa, Artificial Sequence; identical to SEQ ID NO: 784
  Description of Artificial Sequence: Synthetic polypeptide

SEQ ID NO: 789 - protein, 221 aa, Artificial Sequence
  Description of Artificial Sequence: Synthetic polypeptide
DIQMTQSPSSVSASVGDRVTITCRASQGISSWLAWYQQKPGKAPNLLIYEASSLQSGVPSRFGGSGSGTDFTLTISSLQPEDFATYYCQQANGFPWTFGQGTKVEIKRTVAAPDIQMTQSPSSLSASVGDRVTITCRASQDVSTAVAWYQQKPGKAPKLLIYSASFLYSGVPSRFSGSGSGTDFTLTISSLQPEDFATYYCQQSYTTPPTFGQGTKVEIKR

SEQ ID NO: 790 - protein, 255 aa, Artificial Sequence; identical to SEQ ID NO: 786
  Description of Artificial Sequence: Synthetic polypeptide

SEQ ID NO: 791 - protein, 221 aa, Artificial Sequence
  Description of Artificial Sequence: Synthetic polypeptide
DIQMTQSPSSLSASVGDRVTITCRASQDVSTAVAWYQQKPGKAPKLLIYSASFLYSGVPSRFSGSGSGTDFTLTISSLQPEDFATYYCQQSYTTPPTFGQGTKVEIKRTVAAPDIQMTQSPSSVSASVGDRVTITCRASQGISSWLAWYQQKPGKAPNLLIYEASSLQSGVPSRFGGSGSGTDFTLTISSLQPEDFATYYCQQANGFPWTFGQGTKVEIKR

SEQ ID NO: 792 - protein, 248 aa, Artificial Sequence
  Description of Artificial Sequence: Synthetic polypeptide
QVQLVESGGGLVKPGGSLRLSCAASGFTFSDYYMSWIRQAPGKGLEWVSYISSSGSTIYYADSVKGRFTISRDNAKNSLYLQMNSLRAEDTAVYYCARDEYNSGWYVLFDYWGQGTLVTVSSASTKGPEVQLVESGGGLVQPGGSLRLSCAASGFTISDYWIHWVRQAPGKGLEWVAGITPAGGYTYYADSVKGRFTISADTSKNTAYLQMNSLRAEDTAVYYCARFVFFLPYAMDYWGQGTLVTVSS

SEQ ID NO: 793 - protein, 228 aa, Artificial Sequence; identical to SEQ ID NO: 785
  Description of Artificial Sequence: Synthetic polypeptide

SEQ ID NO: 794 - protein, 248 aa, Artificial Sequence
  Description of Artificial Sequence: Synthetic polypeptide
EVQLVESGGGLVQPGGSLRLSCAASGFTISDYWIHWVRQAPGKGLEWVAGITPAGGYTYYADSVKGRFTISADTSKNTAYLQMNSLRAEDTAVYYCARFVFFLPYAMDYWGQGTLVTVSSASTKGPQVQLVESGGGLVKPGGSLRLSCAASGFTFSDYYMSWIRQAPGKGLEWVSYISSSGSTIYYADSVKGRFTISRDNAKNSLYLQMNSLRAEDTAVYYCARDEYNSGWYVLFDYWGQGTLVTVSS

SEQ ID NO: 795 - protein, 228 aa, Artificial Sequence; identical to SEQ ID NO: 787
  Description of Artificial Sequence: Synthetic polypeptide

SEQ ID NO: 796 - protein, 248 aa, Artificial Sequence; identical to SEQ ID NO: 792
  Description of Artificial Sequence: Synthetic polypeptide

SEQ ID NO: 797 - protein, 221 aa, Artificial Sequence; identical to SEQ ID NO: 789
  Description of Artificial Sequence: Synthetic polypeptide

SEQ ID NO: 798 - protein, 248 aa, Artificial Sequence; identical to SEQ ID NO: 794
  Description of Artificial Sequence: Synthetic polypeptide

SEQ ID NO: 799 - protein, 221 aa, Artificial Sequence; identical to SEQ ID NO: 791
  Description of Artificial Sequence: Synthetic polypeptide

SEQ ID NO: 800 - protein, 256 aa, Artificial Sequence
  Description of Artificial Sequence: Synthetic polypeptide
QVQLVESGGGLVKPGGSLRLSCAASGFTFSDYYMSWIRQAPGKGLEWVSYISSSGSTIYYADSVKGRFTISRDNAKNSLYLQMNSLRAEDTAVYYCARDEYNSGWYVLFDYWGQGTLVTVSSASTKGPSVFPLAPEVQLVESGGGLVQPGGSLRLSCAASGFTINASWIHWVRQAPGKGLEWVGAIYPYSGYTNYADSVKGRFTISADTSKNTAYLQMNSLRAEDTAVYYCARWGHSTSPWAMDYWGQGTLVTVSS

SEQ ID NO: 801 - protein, 228 aa, Artificial Sequence
  Description of Artificial Sequence: Synthetic polypeptide
DIQMTQSPSSVSASVGDRVTITCRASQGISSWLAWYQQKPGKAPNLLIYEASSLQSGVPSRFGGSGSGTDFTLTISSLQPEDFATYYCQQANGFPWTFGQGTKVEIKRTVAAPSVFIFPPDIQMTQSPSSLSASVGDRVTITCRASQVIRRSLAWYQQKPGKAPKLLIYAASNLASGVPSRFSGSGSGTDFTLTISSLQPEDFATYYCQQSNTSPLTFGQGTKVEIKR

SEQ ID NO: 802 - protein, 256 aa, Artificial Sequence
  Description of Artificial Sequence: Synthetic polypeptide
EVQLVESGGGLVQPGGSLRLSCAASGFTINASWIHWVRQAPGKGLEWVGAIYPYSGYTNYADSVKGRFTISADTSKNTAYLQMNSLRAEDTAVYYCARWGHSTSPWAMDYWGQGTLVTVSSASTKGPSVFPLAPQVQLVESGGGLVKPGGSLRLSCAASGFTFSDYYMSWIRQAPGKGLEWVSYISSSGSTIYYADSVKGRFTISRDNAKNSLYLQMNSLRAEDTAVYYCARDEYNSGWYVLFDYWGQGTLVTVSS

SEQ ID NO: 803 - protein, 228 aa, Artificial Sequence
  Description of Artificial Sequence: Synthetic polypeptide
DIQMTQSPSSLSASVGDRVTITCRASQVIRRSLAWYQQKPGKAPKLLIYAASNLASGVPSRFSGSGSGTDFTLTISSLQPEDFATYYCQQSNTSPLTFGQGTKVEIKRTVAAPSVFIFPPDIQMTQSPSSVSASVGDRVTITCRASQGISSWLAWYQQKPGKAPNLLIYEASSLQSGVPSRFGGSGSGTDFTLTISSLQPEDFATYYCQQANGFPWTFGQGTKVEIKR

SEQ ID NO: 804 - protein, 256 aa, Artificial Sequence; identical to SEQ ID NO: 800
  Description of Artificial Sequence: Synthetic polypeptide

SEQ ID NO: 805 - protein, 221 aa, Artificial Sequence
  Description of Artificial Sequence: Synthetic polypeptide
DIQMTQSPSSVSASVGDRVTITCRASQGISSWLAWYQQKPGKAPNLLIYEASSLQSGVPSRFGGSGSGTDFTLTISSLQPEDFATYYCQQANGFPWTFGQGTKVEIKRTVAAPDIQMTQSPSSLSASVGDRVTITCRASQVIRRSLAWYQQKPGKAPKLLIYAASNLASGVPSRFSGSGSGTDFTLTISSLQPEDFATYYCQQSNTSPLTFGQGTKVEIKR

SEQ ID NO: 806 - protein, 256 aa, Artificial Sequence; identical to SEQ ID NO: 802
  Description of Artificial Sequence: Synthetic polypeptide

SEQ ID NO: 807 - protein, 221 aa, Artificial Sequence
  Description of Artificial Sequence: Synthetic polypeptide
DIQMTQSPSSLSASVGDRVTITCRASQVIRRSLAWYQQKPGKAPKLLIYAASNLASGVPSRFSGSGSGTDFTLTISSLQPEDFATYYCQQSNTSPLTFGQGTKVEIKRTVAAPDIQMTQSPSSVSASVGDRVTITCRASQGISSWLAWYQQKPGKAPNLLIYEASSLQSGVPSRFGGSGSGTDFTLTISSLQPEDFATYYCQQANGFPWTFGQGTKVEIKR

SEQ ID NO: 808 - protein, 249 aa, Artificial Sequence
  Description of Artificial Sequence: Synthetic polypeptide
QVQLVESGGGLVKPGGSLRLSCAASGFTFSDYYMSWIRQAPGKGLEWVSYISSSGSTIYYADSVKGRFTISRDNAKNSLYLQMNSLRAEDTAVYYCARDEYNSGWYVLFDYWGQGTLVTVSSASTKGPEVQLVESGGGLVQPGGSLRLSCAASGFTINASWIHWVRQAPGKGLEWVGAIYPYSGYTNYADSVKGRFTISADTSKNTAYLQMNSLRAEDTAVYYCARWGHSTSPWAMDYWGQGTLVTVSS

SEQ ID NO: 809 - protein, 228 aa, Artificial Sequence; identical to SEQ ID NO: 801
  Description of Artificial Sequence: Synthetic polypeptide

SEQ ID NO: 810 - protein, 249 aa, Artificial Sequence
  Description of Artificial Sequence: Synthetic polypeptide
EVQLVESGGGLVQPGGSLRLSCAASGFTINASWIHWVRQAPGKGLEWVGAIYPYSGYTNYADSVKGRFTISADTSKNTAYLQMNSLRAEDTAVYYCARWGHSTSPWAMDYWGQGTLVTVSSASTKGPQVQLVESGGGLVKPGGSLRLSCAASGFTFSDYYMSWIRQAPGKGLEWVSYISSSGSTIYYADSVKGRFTISRDNAKNSLYLQMNSLRAEDTAVYYCARDEYNSGWYVLFDYWGQGTLVTVSS

SEQ ID NO: 811 - protein, 228 aa, Artificial Sequence; identical to SEQ ID NO: 803
  Description of Artificial Sequence: Synthetic polypeptide

SEQ ID NO: 812 - protein, 249 aa, Artificial Sequence; identical to SEQ ID NO: 808
  Description of Artificial Sequence: Synthetic polypeptide

SEQ ID NO: 813 - protein, 221 aa, Artificial Sequence; identical to SEQ ID NO: 805
  Description of Artificial Sequence: Synthetic polypeptide

SEQ ID NO: 814 - protein, 249 aa, Artificial Sequence; identical to SEQ ID NO: 810
  Description of Artificial Sequence: Synthetic polypeptide

SEQ ID NO: 815 - protein, 221 aa, Artificial Sequence; identical to SEQ ID NO: 807
  Description of Artificial Sequence: Synthetic polypeptide

SEQ ID NO: 816 - protein, 247 aa, Artificial Sequence
  Description of Artificial Sequence: Synthetic polypeptide
EVQLVQSGAEVKKPGESLKISCKGSGYSFTTYWMHWVRQMPGKGLEWMGEINPTNGHTNYNPSFQGQVTISADKSISTAYLQWSSLKASDTAMYYCARNYVGSIFDYWGQGTLVTVSSASTKGPEVQLVESGGGLVQPGGSLRLSCAASGYTFTNYGMNWVRQAPGKGLEWVGWINTYTGEPTYAADFKRRFTFSLDTSKSTAYLQMNSLRAEDTAVYYCAKYPHYYGSSHWYFDVWGQGTLVTVSS

SEQ ID NO: 817 - protein, 221 aa, Artificial Sequence
  Description of Artificial Sequence: Synthetic polypeptide
DIQMTQSPSSLSASVGDRVTITCKASENVVSYVSWYQQKPGKAPKLLIYGASNRNTGVPSRFSGSGSGTDFTLTISSLQPEDFATYYCGQSYNYPYTFGQGTKLEIKRTVAAPDIQMTQSPSSLSASVGDRVTITCSASQDISNYLNWYQQKPGKAPKVLIYFTSSLHSGVPSRFSGSGSGTDFTLTISSLQPEDFATYYCQQYSTVPWTFGQGTKVEIKR

SEQ ID NO: 818 - protein, 247 aa, Artificial Sequence
  Description of Artificial Sequence: Synthetic polypeptide
EVQLVESGGGLVQPGGSLRLSCAASGYTFTNYGMNWVRQAPGKGLEWVGWINTYTGEPTYAADFKRRFTFSLDTSKSTAYLQMNSLRAEDTAVYYCAKYPHYYGSSHWYFDVWGQGTLVTVSSASTKGPEVQLVQSGAEVKKPGESLKISCKGSGYSFTTYWMHWVRQMPGKGLEWMGEINPTNGHTNYNPSFQGQVTISADKSISTAYLQWSSLKASDTAMYYCARNYVGSIFDYWGQGTLVTVSS

SEQ ID NO: 819 - protein, 221 aa, Artificial Sequence
  Description of Artificial Sequence: Synthetic polypeptide
DIQMTQSPSSLSASVGDRVTITCSASQDISNYLNWYQQKPGKAPKVLIYFTSSLHSGVPSRFSGSGSGTDFTLTISSLQPEDFATYYCQQYSTVPWTFGQGTKVEIKRTVAAPDIQMTQSPSSLSASVGDRVTITCKASENVVSYVSWYQQKPGKAPKLLIYGASNRNTGVPSRFSGSGSGTDFTLTISSLQPEDFATYYCGQSYNYPYTFGQGTKLEIKR

SEQ ID NO: 820 - protein, 254 aa, Artificial Sequence
  Description of Artificial Sequence: Synthetic polypeptide
EVQLVQSGAEVKKPGESLKISCKGSGYSFTTYWMHWVRQMPGKGLEWMGEINPTNGHTNYNPSFQGQVTISADKSISTAYLQWSSLKASDTAMYYCARNYVGSIFDYWGQGTLVTVSSASTKGPSVFPLAPEVQLVESGGGLVQPGGSLRLSCAASGYTFTNYGMNWVRQAPGKGLEWVGWINTYTGEPTYAADFKRRFTFSLDTSKSTAYLQMNSLRAEDTAVYYCAKYPHYYGSSHWYFDVWGQGTLVTVSS

SEQ ID NO: 821 - protein, 228 aa, Artificial Sequence
  Description of Artificial Sequence: Synthetic polypeptide
DIQMTQSPSSLSASVGDRVTITCKASENVVSYVSWYQQKPGKAPKLLIYGASNRNTGVPSRFSGSGSGTDFTLTISSLQPEDFATYYCGQSYNYPYTFGQGTKLEIKRTVAAPSVFIFPPDIQMTQSPSSLSASVGDRVTITCSASQDISNYLNWYQQKPGKAPKVLIYFTSSLHSGVPSRFSGSGSGTDFTLTISSLQPEDFATYYCQQYSTVPWTFGQGTKVEIKR

SEQ ID NO: 822 - protein, 254 aa, Artificial Sequence
  Description of Artificial Sequence: Synthetic polypeptide
EVQLVESGGGLVQPGGSLRLSCAASGYTFTNYGMNWVRQAPGKGLEWVGWINTYTGEPTYAADFKRRFTFSLDTSKSTAYLQMNSLRAEDTAVYYCAKYPHYYGSSHWYFDVWGQGTLVTVSSASTKGPSVFPLAPEVQLVQSGAEVKKPGESLKISCKGSGYSFTTYWMHWVRQMPGKGLEWMGEINPTNGHTNYNPSFQGQVTISADKSISTAYLQWSSLKASDTAMYYCARNYVGSIFDYWGQGTLVTVSS

SEQ ID NO: 823 - protein, 228 aa, Artificial Sequence
  Description of Artificial Sequence: Synthetic polypeptide
DIQMTQSPSSLSASVGDRVTITCSASQDISNYLNWYQQKPGKAPKVLIYFTSSLHSGVPSRFSGSGSGTDFTLTISSLQPEDFATYYCQQYSTVPWTFGQGTKVEIKRTVAAPSVFIFPPDIQMTQSPSSLSASVGDRVTITCKASENVVSYVSWYQQKPGKAPKLLIYGASNRNTGVPSRFSGSGSGTDFTLTISSLQPEDFATYYCGQSYNYPYTFGQGTKLEIKR

SEQ ID NO: 824 - protein, 254 aa, Artificial Sequence; identical to SEQ ID NO: 820
  Description of Artificial Sequence: Synthetic polypeptide

SEQ ID NO: 825 - protein, 221 aa, Artificial Sequence; identical to SEQ ID NO: 817
  Description of Artificial Sequence: Synthetic polypeptide

SEQ ID NO: 826 - protein, 254 aa, Artificial Sequence; identical to SEQ ID NO: 822
  Description of Artificial Sequence: Synthetic polypeptide

SEQ ID NO: 827 - protein, 221 aa, Artificial Sequence; identical to SEQ ID NO: 819
  Description of Artificial Sequence: Synthetic polypeptide

SEQ ID NO: 828 - protein, 247 aa, Artificial Sequence; identical to SEQ ID NO: 816
  Description of Artificial Sequence: Synthetic polypeptide

SEQ ID NO: 829 - protein, 228 aa, Artificial Sequence; identical to SEQ ID NO: 821
  Description of Artificial Sequence: Synthetic polypeptide

SEQ ID NO: 830 - protein, 247 aa, Artificial Sequence; identical to SEQ ID NO: 818
  Description of Artificial Sequence: Synthetic polypeptide

SEQ ID NO: 831 - protein, 228 aa, Artificial Sequence; identical to SEQ ID NO: 823
  Description of Artificial Sequence: Synthetic polypeptide

SEQ ID NO: 832 - protein, 244 aa, Artificial Sequence
  Description of Artificial Sequence: Synthetic polypeptide
EVQLVQSGAEVKKPGESLKISCKGSGYSFTTYWMHWVRQMPGKGLEWMGEINPTNGHTNYNPSFQGQVTISADKSISTAYLQWSSLKASDTAMYYCARNYVGSIFDYWGQGTLVTVSSASTKGPEVQLVESGGGLVQPGGSLRLSCAASGFTISDYWIHWVRQAPGKGLEWVAGITPAGGYTYYADSVKGRFTISADTSKNTAYLQMNSLRAEDTAVYYCARFVFFLPYAMDYWGQGTLVTVSS

SEQ ID NO: 833 - protein, 221 aa, Artificial Sequence
  Description of Artificial Sequence: Synthetic polypeptide
DIQMTQSPSSLSASVGDRVTITCKASENVVSYVSWYQQKPGKAPKLLIYGASNRNTGVPSRFSGSGSGTDFTLTISSLQPEDFATYYCGQSYNYPYTFGQGTKLEIKRTVAAPDIQMTQSPSSLSASVGDRVTITCRASQDVSTAVAWYQQKPGKAPKLLIYSASFLYSGVPSRFSGSGSGTDFTLTISSLQPEDFATYYCQQSYTTPPTFGQGTKVEIKR

SEQ ID NO: 834 - protein, 244 aa, Artificial Sequence
  Description of Artificial Sequence: Synthetic polypeptide
EVQLVESGGGLVQPGGSLRLSCAASGFTISDYWIHWVRQAPGKGLEWVAGITPAGGYTYYADSVKGRFTISADTSKNTAYLQMNSLRAEDTAVYYCARFVFFLPYAMDYWGQGTLVTVSSASTKGPEVQLVQSGAEVKKPGESLKISCKGSGYSFTTYWMHWVRQMPGKGLEWMGEINPTNGHTNYNPSFQGQVTISADKSISTAYLQWSSLKASDTAMYYCARNYVGSIFDYWGQGTLVTVSS

SEQ ID NO: 835 - protein, 221 aa, Artificial Sequence
  Description of Artificial Sequence: Synthetic polypeptide
DIQMTQSPSSLSASVGDRVTITCRASQDVSTAVAWYQQKPGKAPKLLIYSASFLYSGVPSRFSGSGSGTDFTLTISSLQPEDFATYYCQQSYTTPPTFGQGTKVEIKRTVAAPDIQMTQSPSSLSASVGDRVTITCKASENVVSYVSWYQQKPGKAPKLLIYGASNRNTGVPSRFSGSGSGTDFTLTISSLQPEDFATYYCGQSYNYPYTFGQGTKLEIKR

SEQ ID NO: 836 - protein, 251 aa, Artificial Sequence
  Description of Artificial Sequence: Synthetic polypeptide
EVQLVQSGAEVKKPGESLKISCKGSGYSFTTYWMHWVRQMPGKGLEWMGEINPTNGHTNYNPSFQGQVTISADKSISTAYLQWSSLKASDTAMYYCARNYVGSIFDYWGQGTLVTVSSASTKGPSVFPLAPEVQLVESGGGLVQPGGSLRLSCAASGFTISDYWIHWVRQAPGKGLEWVAGITPAGGYTYYADSVKGRFTISADTSKNTAYLQMNSLRAEDTAVYYCARFVFFLPYAMDYWGQGTLVTVSS

SEQ ID NO: 837 - protein, 228 aa, Artificial Sequence
  Description of Artificial Sequence: Synthetic polypeptide
DIQMTQSPSSLSASVGDRVTITCKASENVVSYVSWYQQKPGKAPKLLIYGASNRNTGVPSRFSGSGSGTDFTLTISSLQPEDFATYYCGQSYNYPYTFGQGTKLEIKRTVAAPSVFIFPPDIQMTQSPSSLSASVGDRVTITCRASQDVSTAVAWYQQKPGKAPKLLIYSASFLYSGVPSRFSGSGSGTDFTLTISSLQPEDFATYYCQQSYTTPPTFGQGTKVEIKR

SEQ ID NO: 838 - protein, 251 aa, Artificial Sequence
  Description of Artificial Sequence: Synthetic polypeptide
EVQLVESGGGLVQPGGSLRLSCAASGFTISDYWIHWVRQAPGKGLEWVAGITPAGGYTYYADSVKGRFTISADTSKNTAYLQMNSLRAEDTAVYYCARFVFFLPYAMDYWGQGTLVTVSSASTKGPSVFPLAPEVQLVQSGAEVKKPGESLKISCKGSGYSFTTYWMHWVRQMPGKGLEWMGEINPTNGHTNYNPSFQGQVTISADKSISTAYLQWSSLKASDTAMYYCARNYVGSIFDYWGQGTLVTVSS

SEQ ID NO: 839 - protein, 228 aa, Artificial Sequence
  Description of Artificial Sequence: Synthetic polypeptide
DIQMTQSPSSLSASVGDRVTITCRASQDVSTAVAWYQQKPGKAPKLLIYSASFLYSGVPSRFSGSGSGTDFTLTISSLQPEDFATYYCQQSYTTPPTFGQGTKVEIKRTVAAPSVFIFPPDIQMTQSPSSLSASVGDRVTITCKASENVVSYVSWYQQKPGKAPKLLIYGASNRNTGVPSRFSGSGSGTDFTLTISSLQPEDFATYYCGQSYNYPYTFGQGTKLEIKR

SEQ ID NO: 840 - protein, 251 aa, Artificial Sequence; identical to SEQ ID NO: 836
  Description of Artificial Sequence: Synthetic polypeptide

SEQ ID NO: 841 - protein, 221 aa, Artificial Sequence; identical to SEQ ID NO: 833
  Description of Artificial Sequence: Synthetic polypeptide

SEQ ID NO: 842 - protein, 251 aa, Artificial Sequence; identical to SEQ ID NO: 838
  Description of Artificial Sequence: Synthetic polypeptide

SEQ ID NO: 843 - protein, 221 aa, Artificial Sequence; identical to SEQ ID NO: 835
  Description of Artificial Sequence: Synthetic polypeptide

SEQ ID NO: 844 - protein, 244 aa, Artificial Sequence; identical to SEQ ID NO: 832
  Description of Artificial Sequence: Synthetic polypeptide

SEQ ID NO: 845 - protein, 228 aa, Artificial Sequence; identical to SEQ ID NO: 837
  Description of Artificial Sequence: Synthetic polypeptide

SEQ ID NO: 846 - protein, 244 aa, Artificial Sequence; identical to SEQ ID NO: 834
  Description of Artificial Sequence: Synthetic polypeptide

SEQ ID NO: 847 - protein, 228 aa, Artificial Sequence; identical to SEQ ID NO: 839
  Description of Artificial Sequence: Synthetic polypeptide

SEQ ID NO: 848 - protein, 245 aa, Artificial Sequence
  Description of Artificial Sequence: Synthetic polypeptide
EVQLVQSGAEVKKPGESLKISCKGSGYSFTTYWMHWVRQMPGKGLEWMGEINPTNGHTNYNPSFQGQVTISADKSISTAYLQWSSLKASDTAMYYCARNYVGSIFDYWGQGTLVTVSSASTKGPEVQLVESGGGLVQPGGSLRLSCAASGFTINASWIHWVRQAPGKGLEWVGAIYPYSGYTNYADSVKGRFTISADTSKNTAYLQMNSLRAEDTAVYYCARWGHSTSPWAMDYWGQGTLVTVSS

SEQ ID NO: 849 - protein, 221 aa, Artificial Sequence
  Description of Artificial Sequence: Synthetic polypeptide
DIQMTQSPSSLSASVGDRVTITCKASENVVSYVSWYQQKPGKAPKLLIYGASNRNTGVPSRFSGSGSGTDFTLTISSLQPEDFATYYCGQSYNYPYTFGQGTKLEIKRTVAAPDIQMTQSPSSLSASVGDRVTITCRASQVIRRSLAWYQQKPGKAPKLLIYAASNLASGVPSRFSGSGSGTDFTLTISSLQPEDFATYYCQQSNTSPLTFGQGTKVEIKR

SEQ ID NO: 850 - protein, 245 aa, Artificial Sequence
  Description of Artificial Sequence: Synthetic polypeptide
EVQLVESGGGLVQPGGSLRLSCAASGFTINASWIHWVRQAPGKGLEWVGAIYPYSGYTNYADSVKGRFTISADTSKNTAYLQMNSLRAEDTAVYYCARWGHSTSPWAMDYWGQGTLVTVSSASTKGPEVQLVQSGAEVKKPGESLKISCKGSGYSFTTYWMHWVRQMPGKGLEWMGEINPTNGHTNYNPSFQGQVTISADKSISTAYLQWSSLKASDTAMYYCARNYVGSIFDYWGQGTLVTVSS

SEQ ID NO: 851 - protein, 221 aa, Artificial Sequence
  Description of Artificial Sequence: Synthetic polypeptide
DIQMTQSPSSLSASVGDRVTITCRASQVIRRSLAWYQQKPGKAPKLLIYAASNLASGVPSRFSGSGSGTDFTLTISSLQPEDFATYYCQQSNTSPLTFGQGTKVEIKRTVAAPDIQMTQSPSSLSASVGDRVTITCKASENVVSYVSWYQQKPGKAPKLLIYGASNRNTGVPSRFSGSGSGTDFTLTISSLQPEDFATYYCGQSYNYPYTFGQGTKLEIKR

SEQ ID NO: 852 - protein, 252 aa, Artificial Sequence
  Description of Artificial Sequence: Synthetic polypeptide
EVQLVQSGAEVKKPGESLKISCKGSGYSFTTYWMHWVRQMPGKGLEWMGEINPTNGHTNYNPSFQGQVTISADKSISTAYLQWSSLKASDTAMYYCARNYVGSIFDYWGQGTLVTVSSASTKGPSVFPLAPEVQLVESGGGLVQPGGSLRLSCAASGFTINASWIHWVRQAPGKGLEWVGAIYPYSGYTNYADSVKGRFTISADTSKNTAYLQMNSLRAEDTAVYYCARWGHSTSPWAMDYWGQGTLVTVSS

SEQ ID NO: 853 - protein, 228 aa, Artificial Sequence
  Description of Artificial Sequence: Synthetic polypeptide
DIQMTQSPSSLSASVGDRVTITCKASENVVSYVSWYQQKPGKAPKLLIYGASNRNTGVPSRFSGSGSGTDFTLTISSLQPEDFATYYCGQSYNYPYTFGQGTKLEIKRTVAAPSVFIFPPDIQMTQSPSSLSASVGDRVTITCRASQVIRRSLAWYQQKPGKAPKLLIYAASNLASGVPSRFSGSGSGTDFTLTISSLQPEDFATYYCQQSNTSPLTFGQGTKVEIKR

SEQ ID NO: 854 - protein, 252 aa, Artificial Sequence
  Description of Artificial Sequence: Synthetic polypeptide
EVQLVESGGGLVQPGGSLRLSCAASGFTINASWIHWVRQAPGKGLEWVGAIYPYSGYTNYADSVKGRFTISADTSKNTAYLQMNSLRAEDTAVYYCARWGHSTSPWAMDYWGQGTLVTVSSASTKGPSVFPLAPEVQLVQSGAEVKKPGESLKISCKGSGYSFTTYWMHWVRQMPGKGLEWMGEINPTNGHTNYNPSFQGQVTISADKSISTAYLQWSSLKASDTAMYYCARNYVGSIFDYWGQGTLVTVSS

SEQ ID NO: 855 - protein, 228 aa, Artificial Sequence
  Description of Artificial Sequence: Synthetic polypeptide
DIQMTQSPSSLSASVGDRVTITCRASQVIRRSLAWYQQKPGKAPKLLIYAASNLASGVPSRFSGSGSGTDFTLTISSLQPEDFATYYCQQSNTSPLTFGQGTKVEIKRTVAAPSVFIFPPDIQMTQSPSSLSASVGDRVTITCKASENVVSYVSWYQQKPGKAPKLLIYGASNRNTGVPSRFSGSGSGTDFTLTISSLQPEDFATYYCGQSYNYPYTFGQGTKLEIKR

SEQ ID NO: 856 - protein, 252 aa, Artificial Sequence; identical to SEQ ID NO: 852
  Description of Artificial Sequence: Synthetic polypeptide

SEQ ID NO: 857 - protein, 221 aa, Artificial Sequence; identical to SEQ ID NO: 849
  Description of Artificial Sequence: Synthetic polypeptide

SEQ ID NO: 858 - protein, 252 aa, Artificial Sequence; identical to SEQ ID NO: 854
  Description of Artificial Sequence: Synthetic polypeptide

SEQ ID NO: 859 - protein, 221 aa, Artificial Sequence; identical to SEQ ID NO: 851
  Description of Artificial Sequence: Synthetic polypeptide

SEQ ID NO: 860 - protein, 245 aa, Artificial Sequence; identical to SEQ ID NO: 848
  Description of Artificial Sequence: Synthetic polypeptide

SEQ ID NO: 861 - protein, 228 aa, Artificial Sequence; identical to SEQ ID NO: 853
  Description of Artificial Sequence: Synthetic polypeptide

SEQ ID NO: 862 - protein, 245 aa, Artificial Sequence; identical to SEQ ID NO: 850
  Description of Artificial Sequence: Synthetic polypeptide

SEQ ID NO: 863 - protein, 228 aa, Artificial Sequence; identical to SEQ ID NO: 855
  Description of Artificial Sequence: Synthetic polypeptide

SEQ ID NO: 864 - protein, 245 aa, Artificial Sequence
  Description of Artificial Sequence: Synthetic polypeptide
EVQLVESGGGLVQPGGSLRLSCAASGFNIKDTYIHWVRQAPGKGLEWVARIYPTNGYTRYADSVKGRFTISADTSKNTAYLQMNSLRAEDTAVYYCSRWGGDGFYAMDYWGQGTLVTVSSASTKGPEVQLVESGGGLVQPGGSLRLSCAASGFTFTDYTMDWVRQAPGKGLEWVADVNPNSGGSIYNQRFKGRFTLSVDRSKNTLYLQMNSLRAEDTAVYYCARNLGPSFYFDYWGQGTLVTVSS

SEQ ID NO: 865 - protein, 221 aa, Artificial Sequence
  Description of Artificial Sequence: Synthetic polypeptide
DIQMTQSPSSLSASVGDRVTITCRASQDVNTAVAWYQQKPGKAPKLLIYSASFLYSGVPSRFSGSRSGTDFTLTISSLQPEDFATYYCQQHYTTPPTFGQGTKVEIKRTVAAPDIQMTQSPSSLSASVGDRVTITCKASQDVSIGVAWYQQKPGKAPKLLIYSASYRYTGVPSRFSGSGSGTDFTLTISSLQPEDFATYYCQQYYIYPYTFGQGTKVEIKR

SEQ ID NO: 866 - protein, 245 aa, Artificial Sequence
  Description of Artificial Sequence: Synthetic polypeptide
EVQLVESGGGLVQPGGSLRLSCAASGFTFTDYTMDWVRQAPGKGLEWVADVNPNSGGSIYNQRFKGRFTLSVDRSKNTLYLQMNSLRAEDTAVYYCARNLGPSFYFDYWGQGTLVTVSSASTKGPEVQLVESGGGLVQPGGSLRLSCAASGFNIKDTYIHWVRQAPGKGLEWVARIYPTNGYTRYADSVKGRFTISADTSKNTAYLQMNSLRAEDTAVYYCSRWGGDGFYAMDYWGQGTLVTVSS

SEQ ID NO: 867 - protein, 221 aa, Artificial Sequence
  Description of Artificial Sequence: Synthetic polypeptide
DIQMTQSPSSLSASVGDRVTITCKASQDVSIGVAWYQQKPGKAPKLLIYSASYRYTGVPSRFSGSGSGTDFTLTISSLQPEDFATYYCQQYYIYPYTFGQGTKVEIKRTVAAPDIQMTQSPSSLSASVGDRVTITCRASQDVNTAVAWYQQKPGKAPKLLIYSASFLYSGVPSRFSGSRSGTDFTLTISSLQPEDFATYYCQQHYTTPPTFGQGTKVEIKR

SEQ ID NO: 868 - protein, 252 aa, Artificial Sequence
  Description of Artificial Sequence: Synthetic polypeptide
EVQLVESGGGLVQPGGSLRLSCAASGFNIKDTYIHWVRQAPGKGLEWVARIYPTNGYTRYADSVKGRFTISADTSKNTAYLQMNSLRAEDTAVYYCSRWGGDGFYAMDYWGQGTLVTVSSASTKGPSVFPLAPEVQLVESGGGLVQPGGSLRLSCAASGFTFTDYTMDWVRQAPGKGLEWVADVNPNSGGSIYNQRFKGRFTLSVDRSKNTLYLQMNSLRAEDTAVYYCARNLGPSFYFDYWGQGTLVTVSS

SEQ ID NO: 869 - protein, 228 aa, Artificial Sequence
  Description of Artificial Sequence: Synthetic polypeptide
DIQMTQSPSSLSASVGDRVTITCRASQDVNTAVAWYQQKPGKAPKLLIYSASFLYSGVPSRFSGSRSGTDFTLTISSLQPEDFATYYCQQHYTTPPTFGQGTKVEIKRTVAAPSVFIFPPDIQMTQSPSSLSASVGDRVTITCKASQDVSIGVAWYQQKPGKAPKLLIYSASYRYTGVPSRFSGSGSGTDFTLTISSLQPEDFATYYCQQYYIYPYTFGQGTKVEIKR

SEQ ID NO: 870 - protein, 252 aa, Artificial Sequence
  Description of Artificial Sequence: Synthetic polypeptide
EVQLVESGGGLVQPGGSLRLSCAASGFTFTDYTMDWVRQAPGKGLEWVADVNPNSGGSIYNQRFKGRFTLSVDRSKNTLYLQMNSLRAEDTAVYYCARNLGPSFYFDYWGQGTLVTVSSASTKGPSVFPLAPEVQLVESGGGLVQPGGSLRLSCAASGFNIKDTYIHWVRQAPGKGLEWVARIYPTNGYTRYADSVKGRFTISADTSKNTAYLQMNSLRAEDTAVYYCSRWGGDGFYAMDYWGQGTLVTVSS

SEQ ID NO: 871 - protein, 228 aa, Artificial Sequence
  Description of Artificial Sequence: Synthetic polypeptide
DIQMTQSPSSLSASVGDRVTITCKASQDVSIGVAWYQQKPGKAPKLLIYSASYRYTGVPSRFSGSGSGTDFTLTISSLQPEDFATYYCQQYYIYPYTFGQGTKVEIKRTVAAPSVFIFPPDIQMTQSPSSLSASVGDRVTITCRASQDVNTAVAWYQQKPGKAPKLLIYSASFLYSGVPSRFSGSRSGTDFTLTISSLQPEDFATYYCQQHYTTPPTFGQGTKVEIKR

SEQ ID NO: 872 - protein, 252 aa, Artificial Sequence; identical to SEQ ID NO: 868
  Description of Artificial Sequence: Synthetic polypeptide

SEQ ID NO: 873 - protein, 221 aa, Artificial Sequence; identical to SEQ ID NO: 865
  Description of Artificial Sequence: Synthetic polypeptide

SEQ ID NO: 874 - protein, 252 aa, Artificial Sequence; identical to SEQ ID NO: 870
  Description of Artificial Sequence: Synthetic polypeptide

SEQ ID NO: 875 - protein, 221 aa, Artificial Sequence; identical to SEQ ID NO: 867
  Description of Artificial Sequence: Synthetic polypeptide

SEQ ID NO: 876 - protein, 245 aa, Artificial Sequence; identical to SEQ ID NO: 864
  Description of Artificial Sequence: Synthetic polypeptide

SEQ ID NO: 877 - protein, 228 aa, Artificial Sequence; identical to SEQ ID NO: 869
  Description of Artificial Sequence: Synthetic polypeptide

SEQ ID NO: 878 - protein, 245 aa, Artificial Sequence; identical to SEQ ID NO: 866
  Description of Artificial Sequence: Synthetic polypeptide

SEQ ID NO: 879 - protein, 228 aa, Artificial Sequence; identical to SEQ ID NO: 871
  Description of Artificial Sequence: Synthetic polypeptide

SEQ ID NO: 880 - protein, 253 aa, Artificial Sequence
  Description of Artificial Sequence: Synthetic polypeptide
QVQLQQSGAELARPGASVKMSCKASGYTFTRYTMHWVKQRPGQGLEWIGYINPSRGYTNYNQKFKDKATLTTDKSSSTAYMQLSSLTSEDSAVYYCARYYDDHYCLDYWGQGTTLTVSSASTKGPSVFPLAPEVKLQESGPGLVAPSQSLSVTCTVSGVSLPDYGVSWIRQPPRKGLEWLGVIWGSEGTTYYNSALKSRLTIIKDNSKSQVPLKMNSLQTDDTAIYYCAKHYYYGGSYAMDYWGQGTSVTVSS

SEQ ID NO: 881 - protein, 227 aa, Artificial Sequence
  Description of Artificial Sequence: Synthetic polypeptide
QIVLTQSPAIMSASPGEKVTMTCSASSSVSYMNWYQQKSGTSPKRWIYDTSKLASGVPAHFRGSGSGTSYSLTISGMEAEDAATYYCQQWSSNPFTFGSGTKLEINRTVAAPSVFIFPPDIQMTQTTSSLSASLGDRVTISCRASQDISKTLNWYQQKPDGTVKLLIYHTSRLHSGVPSRFSGSGSGTDYSLTISNLEQEDIATYFCQQGNTLPYTFGGGTKLEITR

SEQ ID NO: 882 - protein, 253 aa, Artificial Sequence
  Description of Artificial Sequence: Synthetic polypeptide
EVKLQESGPGLVAPSQSLSVTCTVSGVSLPDYGVSWIRQPPRKGLEWLGVIWGSEGTTYYNSALKSRLTIIKDNSKSQVPLKMNSLQTDDTAIYYCAKHYYYGGSYAMDYWGQGTSVTVSSASTKGPSVFPLAPQVQLQQSGAELARPGASVKMSCKASGYTFTRYTMHWVKQRPGQGLEWIGYINPSRGYTNYNQKFKDKATLTTDKSSSTAYMQLSSLTSEDSAVYYCARYYDDHYCLDYWGQGTTLTVSS

SEQ ID NO: 883 - protein, 227 aa, Artificial Sequence
  Description of Artificial Sequence: Synthetic polypeptide
DIQMTQTTSSLSASLGDRVTISCRASQDISKTLNWYQQKPDGTVKLLIYHTSRLHSGVPSRFSGSGSGTDYSLTISNLEQEDIATYFCQQGNTLPYTFGGGTKLEITRTVAAPSVFIFPPQIVLTQSPAIMSASPGEKVTMTCSASSSVSYMNWYQQKSGTSPKRWIYDTSKLASGVPAHFRGSGSGTSYSLTISGMEAEDAATYYCQQWSSNPFTFGSGTKLEINR

SEQ ID NO: 884 - protein, 256 aa, Artificial Sequence
  Description of Artificial Sequence: Synthetic polypeptide
EVQLVESGGGLVQPGGSLRLSCAASGYSFTGYTMNWVRQAPGKGLEWVALINPYKGVSTYNQKFKDRFTISVDKSKNTAYLQMNSLRAEDTAVYYCARSGYYGDSDWYFDVWGQGTLVTVSSASTKGPSVFPLAPEVKLQESGPGLVAPSQSLSVTCTVSGVSLPDYGVSWIRQPPRKGLEWLGVIWGSEGTTYYNSALKSRLTIIKDNSKSQVPLKMNSLQTDDTAIYYCAKHYYYGGSYAMDYWGQGTSVTVSS

SEQ ID NO: 885 - protein, 228 aa, Artificial Sequence
  Description of Artificial Sequence: Synthetic polypeptide
DIQMTQSPSSLSASVGDRVTITCRASQDIRNYLNWYQQKPGKAPKLLIYYTSRLESGVPSRFSGSGSGTDYTLTISSLQPEDFATYYCQQGNTLPWTFGQGTKVEIKRTVAAPSVFIFPPDIQMTQTTSSLSASLGDRVTISCRASQDISKTLNWYQQKPDGTVKLLIYHTSRLHSGVPSRFSGSGSGTDYSLTISNLEQEDIATYFCQQGNTLPYTFGGGTKLEITR

SEQ ID NO: 886 - protein, 256 aa, Artificial Sequence
  Description of Artificial Sequence: Synthetic polypeptide
EVKLQESGPGLVAPSQSLSVTCTVSGVSLPDYGVSWIRQPPRKGLEWLGVIWGSEGTTYYNSALKSRLTIIKDNSKSQVPLKMNSLQTDDTAIYYCAKHYYYGGSYAMDYWGQGTSVTVSSASTKGPSVFPLAPEVQLVESGGGLVQPGGSLRLSCAASGYSFTGYTMNWVRQAPGKGLEWVALINPYKGVSTYNQKFKDRFTISVDKSKNTAYLQMNSLRAEDTAVYYCARSGYYGDSDWYFDVWGQGTLVTVSS

SEQ ID NO: 887 - protein, 228 aa, Artificial Sequence
  Description of Artificial Sequence: Synthetic polypeptide
DIQMTQTTSSLSASLGDRVTISCRASQDISKTLNWYQQKPDGTVKLLIYHTSRLHSGVPSRFSGSGSGTDYSLTISNLEQEDIATYFCQQGNTLPYTFGGGTKLEITRTVAAPSVFIFPPDIQMTQSPSSLSASVGDRVTITCRASQDIRNYLNWYQQKPGKAPKLLIYYTSRLESGVPSRFSGSGSGTDYTLTISSLQPEDFATYYCQQGNTLPWTFGQGTKVEIKR

SEQ ID NO: 888 - protein, 253 aa, Artificial Sequence
  Description of Artificial Sequence: Synthetic polypeptide
QVQLQQSGAELARPGASVKMSCKASGYTFTRYTMHWVKQRPGQGLEWIGYINPSRGYTNYNQKFKDKATLTTDKSSSTAYMQLSSLTSEDSAVYYCARYYDDHYCLDYWGQGTTLTVSSASTKGPSVFPLAPEVQLQESGPELVKPGASVKISCKASGYAFSSSWMNWVIQRPGQGLEWIGRIYPGDGDTNYNGKFKGKATLTADKSSSTAYMQLSSLTSVDSAVYFCARSGFITTVLDFDYWGQGTTLTVSS

SEQ ID NO: 889 - protein, 231 aa, Artificial Sequence
  Description of Artificial Sequence: Synthetic polypeptide
QIVLTQSPAIMSASPGEKVTMTCSASSSVSYMNWYQQKSGTSPKRWIYDTSKLASGVPAHFRGSGSGTSYSLTISGMEAEDAATYYCQQWSSNPFTFGSGTKLEINRTVAAPSVFIFPPDIVLTQSPTSLAVSLGQRATISCRASESVDTFGISFMNWFQQKPGQPPKLLIHAASNQGSGVPSRFSGSGSGTDFSLNIHPMEEDDSAMYFCQQSKEVPFTFGSGTKLEIKR

SEQ ID NO: 890 - protein, 253 aa, Artificial Sequence
  Description of Artificial Sequence: Synthetic polypeptide
EVQLQESGPELVKPGASVKISCKASGYAFSSSWMNWVIQRPGQGLEWIGRIYPGDGDTNYNGKFKGKATLTADKSSSTAYMQLSSLTSVDSAVYFCARSGFITTVLDFDYWGQGTTLTVSSASTKGPSVFPLAPQVQLQQSGAELARPGASVKMSCKASGYTFTRYTMHWVKQRPGQGLEWIGYINPSRGYTNYNQKFKDKATLTTDKSSSTAYMQLSSLTSEDSAVYYCARYYDDHYCLDYWGQGTTLTVSS

SEQ ID NO: 891 - protein, 231 aa, Artificial Sequence
  Description of Artificial Sequence: Synthetic polypeptide
DIVLTQSPTSLAVSLGQRATISCRASESVDTFGISFMNWFQQKPGQPPKLLIHAASNQGSGVPSRFSGSGSGTDFSLNIHPMEEDDSAMYFCQQSKEVPFTFGSGTKLEIKRTVAAPSVFIFPPQIVLTQSPAIMSASPGEKVTMTCSASSSVSYMNWYQQKSGTSPKRWIYDTSKLASGVPAHFRGSGSGTSYSLTISGMEAEDAATYYCQQWSSNPFTFGSGTKLEINR

SEQ ID NO: 892 - protein, 256 aa, Artificial Sequence
  Description of Artificial Sequence: Synthetic polypeptide
EVQLVESGGGLVQPGGSLRLSCAASGYSFTGYTMNWVRQAPGKGLEWVALINPYKGVSTYNQKFKDRFTISVDKSKNTAYLQMNSLRAEDTAVYYCARSGYYGDSDWYFDVWGQGTLVTVSSASTKGPSVFPLAPEVQLQESGPELVKPGASVKISCKASGYAFSSSWMNWVIQRPGQGLEWIGRIYPGDGDTNYNGKFKGKATLTADKSSSTAYMQLSSLTSVDSAVYFCARSGFITTVLDFDYWGQGTTLTVSS

SEQ ID NO: 893 - protein, 232 aa, Artificial Sequence
  Description of Artificial Sequence: Synthetic polypeptide
DIQMTQSPSSLSASVGDRVTITCRASQDIRNYLNWYQQKPGKAPKLLIYYTSRLESGVPSRFSGSGSGTDYTLTISSLQPEDFATYYCQQGNTLPWTFGQGTKVEIKRTVAAPSVFIFPPDIVLTQSPTSLAVSLGQRATISCRASESVDTFGISFMNWFQQKPGQPPKLLIHAASNQGSGVPSRFSGSGSGTDFSLNIHPMEEDDSAMYFCQQSKEVPFTFGSGTKLEIKR

SEQ ID NO: 894 - protein, 256 aa, Artificial Sequence
  Description of Artificial Sequence: Synthetic polypeptide
EVQLQESGPELVKPGASVKISCKASGYAFSSSWMNWVIQRPGQGLEWIGRIYPGDGDTNYNGKFKGKATLTADKSSSTAYMQLSSLTSVDSAVYFCARSGFITTVLDFDYWGQGTTLTVSSASTKGPSVFPLAPEVQLVESGGGLVQPGGSLRLSCAASGYSFTGYTMNWVRQAPGKGLEWVALINPYKGVSTYNQKFKDRFTISVDKSKNTAYLQMNSLRAEDTAVYYCARSGYYGDSDWYFDVWGQGTLVTVSS

SEQ ID NO: 895 - protein, 232 aa, Artificial Sequence
  Description of Artificial Sequence: Synthetic polypeptide
DIVLTQSPTSLAVSLGQRATISCRASESVDTFGISFMNWFQQKPGQPPKLLIHAASNQGSGVPSRFSGSGSGTDFSLNIHPMEEDDSAMYFCQQSKEVPFTFGSGTKLEIKRTVAAPSVFIFPPDIQMTQSPSSLSASVGDRVTITCRASQDIRNYLNWYQQKPGKAPKLLIYYTSRLESGVPSRFSGSGSGTDYTLTISSLQPEDFATYYCQQGNTLPWTFGQGTKVEIKR

SEQ ID NO: 896 - protein, 256 aa, Artificial Sequence
  Description of Artificial Sequence: Synthetic polypeptide
QVQLQQSGAELARPGASVKMSCKASGYTFTRYTMHWVKQRPGQGLEWIGYINPSRGYTNYNQKFKDKATLTTDKSSSTAYMQLSSLTSEDSAVYYCARYYDDHYCLDYWGQGTTLTVSSASTKGPSVFPLAPQVQLQQSGAELVRPGSSVKISCKASGYAFSSYWMNWVKQRPGQGLEWIGQIWPGDGDTNYNGKFKGKATLTADESSSTAYMQLSSLASEDSAVYFCARRETTTVGRYYYAMDYWGQGTSVTVSS

SEQ ID NO: 897 - protein, 231 aa, Artificial Sequence
  Description of Artificial Sequence: Synthetic polypeptide
QIVLTQSPAIMSASPGEKVTMTCSASSSVSYMNWYQQKSGTSPKRWIYDTSKLASGVPAHFRGSGSGTSYSLTISGMEAEDAATYYCQQWSSNPFTFGSGTKLEINRTVAAPSVFIFPPDILLTQTPASLAVSLGQRATISCKASQSVDYDGDSYLNWYQQIPGQPPKLLIYDASNLVSGIPPRFSGSGSGTDFTLNIHPVEKVDAATYHCQQSTEDPWTFGGGTKLEIKR

SEQ ID NO: 898 - protein, 256 aa, Artificial Sequence
  Description of Artificial Sequence: Synthetic polypeptide
QVQLQQSGAELVRPGSSVKISCKASGYAFSSYWMNWVKQRPGQGLEWIGQIWPGDGDTNYNGKFKGKATLTADESSSTAYMQLSSLASEDSAVYFCARRETTTVGRYYYAMDYWGQGTSVTVSSASTKGPSVFPLAPQVQLQQSGAELARPGASVKMSCKASGYTFTRYTMHWVKQRPGQGLEWIGYINPSRGYTNYNQKFKDKATLTTDKSSSTAYMQLSSLTSEDSAVYYCARYYDDHYCLDYWGQGTTLTVSS

SEQ ID NO: 899 - protein, 231 aa, Artificial Sequence
  Description of Artificial Sequence: Synthetic polypeptide
DILLTQTPASLAVSLGQRATISCKASQSVDYDGDSYLNWYQQIPGQPPKLLIYDASNLVSGIPPRFSGSGSGTDFTLNIHPVEKVDAATYHCQQSTEDPWTFGGGTKLEIKRTVAAPSVFIFPPQIVLTQSPAIMSASPGEKVTMTCSASSSVSYMNWYQQKSGTSPKRWIYDTSKLASGVPAHFRGSGSGTSYSLTISGMEAEDAATYYCQQWSSNPFTFGSGTKLEINR

SEQ ID NO: 900 - protein, 259 aa, Artificial Sequence
  Description of Artificial Sequence: Synthetic polypeptide
EVQLVESGGGLVQPGGSLRLSCAASGYSFTGYTMNWVRQAPGKGLEWVALINPYKGVSTYNQKFKDRFTISVDKSKNTAYLQMNSLRAEDTAVYYCARSGYYGDSDWYFDVWGQGTLVTVSSASTKGPSVFPLAPQVQLQQSGAELVRPGSSVKISCKASGYAFSSYWMNWVKQRPGQGLEWIGQIWPGDGDTNYNGKFKGKATLTADESSSTAYMQLSSLASEDSAVYFCARRETTTVGRYYYAMDYWGQGTSVTVSS

SEQ ID NO: 901 - protein, 232 aa, Artificial Sequence
  Description of Artificial Sequence: Synthetic polypeptide
DIQMTQSPSSLSASVGDRVTITCRASQDIRNYLNWYQQKPGKAPKLLIYYTSRLESGVPSRFSGSGSGTDYTLTISSLQPEDFATYYCQQGNTLPWTFGQGTKVEIKRTVAAPSVFIFPPDILLTQTPASLAVSLGQRATISCKASQSVDYDGDSYLNWYQQIPGQPPKLLIYDASNLVSGIPPRFSGSGSGTDFTLNIHPVEKVDAATYHCQQSTEDPWTFGGGTKLEIKR

SEQ ID NO: 902 - protein, 259 aa, Artificial Sequence
  Description of Artificial Sequence: Synthetic polypeptide
QVQLQQSGAELVRPGSSVKISCKASGYAFSSYWMNWVKQRPGQGLEWIGQIWPGDGDTNYNGKFKGKATLTADESSSTAYMQLSSLASEDSAVYFCARRETTTVGRYYYAMDYWGQGTSVTVSSASTKGPSVFPLAPEVQLVESGGGLVQPGGSLRLSCAASGYSFTGYTMNWVRQAPGKGLEWVALINPYKGVSTYNQKFKDRFTISVDKSKNTAYLQMNSLRAEDTAVYYCARSGYYGDSDWYFDVWGQGTLVTVSS

SEQ ID NO: 903 - protein, 232 aa, Artificial Sequence
  Description of Artificial Sequence: Synthetic polypeptide
DILLTQTPASLAVSLGQRATISCKASQSVDYDGDSYLNWYQQIPGQPPKLLIYDASNLVSGIPPRFSGSGSGTDFTLNIHPVEKVDAATYHCQQSTEDPWTFGGGTKLEIKRTVAAPSVFIFPPDIQMTQSPSSLSASVGDRVTITCRASQDIRNYLNWYQQKPGKAPKLLIYYTSRLESGVPSRFSGSGSGTDYTLTISSLQPEDFATYYCQQGNTLPWTFGQGTKVEIKR

SEQ ID NO: 904 - protein, 259 aa, Artificial Sequence
  Description of Artificial Sequence: Synthetic polypeptide
EVQLLESGGGLVQPGGSLKLSCAASGFTFNTYAMNWVRQAPGKGLEWVARIRSKYNNYATYYADSVKDRFTISRDDSKNTAYLQMNNLKTEDTAVYYCVRHGNFGNSYVSWFAYWGQGTLVTVSSASTKGPSVFPLAPEVKLQESGPGLVAPSQSLSVTCTVSGVSLPDYGVSWIRQPPRKGLEWLGVIWGSEGTTYYNSALKSRLTIIKDNSKSQVPLKMNSLQTDDTAIYYCAKHYYYGGSYAMDYWGQGTSVTVSS

SEQ ID NO: 905 - protein, 231 aa, Artificial Sequence
  Description of Artificial Sequence: Synthetic polypeptide
ELVVTQEPSLTVSPGGTVTLTCRSSTGAVTTSNYANWVQQKPGQAPRGLIGGTNKRAPGTPARFSGSLLGGKAALTLSGVQPEDEAEYYCALWYSNLWVFGGGTKLTVLGQPKAAPSVTLFPPDIQMTQTTSSLSASLGDRVTISCRASQDISKTLNWYQQKPDGTVKLLIYHTSRLHSGVPSRFSGSGSGTDYSLTISNLEQEDIATYFCQQGNTLPYTFGGGTKLEITR

SEQ ID NO: 906 - protein, 259 aa, Artificial Sequence
  Description of Artificial Sequence: Synthetic polypeptide
EVKLQESGPGLVAPSQSLSVTCTVSGVSLPDYGVSWIRQPPRKGLEWLGVIWGSEGTTYYNSALKSRLTIIKDNSKSQVPLKMNSLQTDDTAIYYCAKHYYYGGSYAMDYWGQGTSVTVSSASTKGPSVFPLAPEVQLLESGGGLVQPGGSLKLSCAASGFTFNTYAMNWVRQAPGKGLEWVARIRSKYNNYATYYADSVKDRFTISRDDSKNTAYLQMNNLKTEDTAVYYCVRHGNFGNSYVSWFAYWGQGTLVTVSS

SEQ ID NO: 907 - protein, 230 aa, Artificial Sequence
  Description of Artificial Sequence: Synthetic polypeptide
DIQMTQTTSSLSASLGDRVTISCRASQDISKTLNWYQQKPDGTVKLLIYHTSRLHSGVPSRFSGSGSGTDYSLTISNLEQEDIATYFCQQGNTLPYTFGGGTKLEITRTVAAPSVFIFPPELVVTQEPSLTVSPGGTVTLTCRSSTGAVTTSNYANWVQQKPGQAPRGLIGGTNKRAPGTPARFSGSLLGGKAALTLSGVQPEDEAEYYCALWYSNLWVFGGGTKLTVLG

SEQ ID NO: 908 - protein, 259 aa, Artificial Sequence
  Description of Artificial Sequence: Synthetic polypeptide
EVQLLESGGGLVQPGGSLKLSCAASGFTFNTYAMNWVRQAPGKGLEWVARIRSKYNNYATYYADSVKDRFTISRDDSKNTAYLQMNNLKTEDTAVYYCVRHGNFGNSYVSWFAYWGQGTLVTVSSASTKGPSVFPLAPEVQLQESGPELVKPGASVKISCKASGYAFSSSWMNWVIQRPGQGLEWIGRIYPGDGDTNYNGKFKGKATLTADKSSSTAYMQLSSLTSVDSAVYFCARSGFITTVLDFDYWGQGTTLTVSS

SEQ ID NO: 909 - protein, 235 aa, Artificial Sequence
  Description of Artificial Sequence: Synthetic polypeptide
ELVVTQEPSLTVSPGGTVTLTCRSSTGAVTTSNYANWVQQKPGQAPRGLIGGTNKRAPGTPARFSGSLLGGKAALTLSGVQPEDEAEYYCALWYSNLWVFGGGTKLTVLGQPKAAPSVTLFPPDIVLTQSPTSLAVSLGQRATISCRASESVDTFGISFMNWFQQKPGQPPKLLIHAASNQGSGVPSRFSGSGSGTDFSLNIHPMEEDDSAMYFCQQSKEVPFTFGSGTKLEIKR

SEQ ID NO: 910 - protein, 259 aa, Artificial Sequence
  Description of Artificial Sequence: Synthetic polypeptide
EVQLQESGPELVKPGASVKISCKASGYAFSSSWMNWVIQRPGQGLEWIGRIYPGDGDTNYNGKFKGKATLTADKSSSTAYMQLSSLTSVDSAVYFCARSGFITTVLDFDYWGQGTTLTVSSASTKGPSVFPLAPEVQLLESGGGLVQPGGSLKLSCAASGFTFNTYAMNWVRQAPGKGLEWVARIRSKYNNYATYYADSVKDRFTISRDDSKNTAYLQMNNLKTEDTAVYYCVRHGNFGNSYVSWFAYWGQGTLVTVSS

SEQ ID NO: 911 - protein, 234 aa, Artificial Sequence
  Description of Artificial Sequence: Synthetic polypeptide
DIVLTQSPTSLAVSLGQRATISCRASESVDTFGISFMNWFQQKPGQPPKLLIHAASNQGSGVPSRFSGSGSGTDFSLNIHPMEEDDSAMYFCQQSKEVPFTFGSGTKLEIKRTVAAPSVFIFPPELVVTQEPSLTVSPGGTVTLTCRSSTGAVTTSNYANWVQQKPGQAPRGLIGGTNKRAPGTPARFSGSLLGGKAALTLSGVQPEDEAEYYCALWYSNLWVFGGGTKLTVLG

SEQ ID NO: 912 - protein, 262 aa, Artificial Sequence
  Description of Artificial Sequence: Synthetic polypeptide
EVQLLESGGGLVQPGGSLKLSCAASGFTFNTYAMNWVRQAPGKGLEWVARIRSKYNNYATYYADSVKDRFTISRDDSKNTAYLQMNNLKTEDTAVYYCVRHGNFGNSYVSWFAYWGQGTLVTVSSASTKGPSVFPLAPQVQLQQSGAELVRPGSSVKISCKASGYAFSSYWMNWVKQRPGQGLEWIGQIWPGDGDTNYNGKFKGKATLTADESSSTAYMQLSSLASEDSAVYFCARRETTTVGRYYYAMDYWGQGTSVTVSS

SEQ ID NO: 913 - protein, 235 aa, Artificial Sequence
  Description of Artificial Sequence: Synthetic polypeptide
ELVVTQEPSLTVSPGGTVTLTCRSSTGAVTTSNYANWVQQKPGQAPRGLIGGTNKRAPGTPARFSGSLLGGKAALTLSGVQPEDEAEYYCALWYSNLWVFGGGTKLTVLGQPKAAPSVTLFPPDILLTQTPASLAVSLGQRATISCKASQSVDYDGDSYLNWYQQIPGQPPKLLIYDASNLVSGIPPRFSGSGSGTDFTLNIHPVEKVDAATYHCQQSTEDPWTFGGGTKLEIKR

SEQ ID NO: 914 - protein, 262 aa, Artificial Sequence
  Description of Artificial Sequence: Synthetic polypeptide
QVQLQQSGAELVRPGSSVKISCKASGYAFSSYWMNWVKQRPGQGLEWIGQIWPGDGDTNYNGKFKGKATLTADESSSTAYMQLSSLASEDSAVYFCARRETTTVGRYYYAMDYWGQGTSVTVSSASTKGPSVFPLAPEVQLLESGGGLVQPGGSLKLSCAASGFTFNTYAMNWVRQAPGKGLEWVARIRSKYNNYATYYADSVKDRFTISRDDSKNTAYLQMNNLKTEDTAVYYCVRHGNFGNSYVSWFAYWGQGTLVTVSS

SEQ ID NO: 915 - protein, 234 aa, Artificial Sequence
  Description of Artificial Sequence: Synthetic polypeptide
DILLTQTPASLAVSLGQRATISCKASQSVDYDGDSYLNWYQQIPGQPPKLLIYDASNLVSGIPPRFSGSGSGTDFTLNIHPVEKVDAATYHCQQSTEDPWTFGGGTKLEIKRTVAAPSVFIFPPELVVTQEPSLTVSPGGTVTLTCRSSTGAVTTSNYANWVQQKPGQAPRGLIGGTNKRAPGTPARFSGSLLGGKAALTLSGVQPEDEAEYYCALWYSNLWVFGGGTKLTVLG

SEQ ID NO: 916 - protein, 255 aa, Artificial Sequence
  Description of Artificial Sequence: Synthetic polypeptide
QVQLQQSGAELVRPGSSVKISCKASGYAFSSYWMNWVKQRPGQGLEWIGQIWPGDGDTNYNGKFKGKATLTADESSSTAYMQLSSLASEDSAVYFCARRETTTVGRYYYAMDYWGQGTSVTVSSASTKGPEVQLLESGGGLVQPGGSLKLSCAASGFTFNTYAMNWVRQAPGKGLEWVARIRSKYNNYATYYADSVKDRFTISRDDSKNTAYLQMNNLKTEDTAVYYCVRHGNFGNSYVSWFAYWGQGTLVTVSS

SEQ ID NO: 917 - protein, 227 aa, Artificial Sequence
  Description of Artificial Sequence: Synthetic polypeptide
DILLTQTPASLAVSLGQRATISCKASQSVDYDGDSYLNWYQQIPGQPPKLLIYDASNLVSGIPPRFSGSGSGTDFTLNIHPVEKVDAATYHCQQSTEDPWTFGGGTKLEIKRTVAAPELVVTQEPSLTVSPGGTVTLTCRSSTGAVTTSNYANWVQQKPGQAPRGLIGGTNKRAPGTPARFSGSLLGGKAALTLSGVQPEDEAEYYCALWYSNLWVFGGGTKLTVLG

SEQ ID NO: 918 - protein, 246 aa, Artificial Sequence
  Description of Artificial Sequence: Synthetic polypeptide
QVQLQQSGAELARPGASVKMSCKASGYTFTRYTMHWVKQRPGQGLEWIGYINPSRGYTNYNQKFKDKATLTTDKSSSTAYMQLSSLTSEDSAVYYCARYYDDHYCLDYWGQGTTLTVSSASTKGPEVKLQESGPGLVAPSQSLSVTCTVSGVSLPDYGVSWIRQPPRKGLEWLGVIWGSEGTTYYNSALKSRLTIIKDNSKSQVPLKMNSLQTDDTAIYYCAKHYYYGGSYAMDYWGQGTSVTVSS

SEQ ID NO: 919 - protein, 220 aa, Artificial Sequence
  Description of Artificial Sequence: Synthetic polypeptide
QIVLTQSPAIMSASPGEKVTMTCSASSSVSYMNWYQQKSGTSPKRWIYDTSKLASGVPAHFRGSGSGTSYSLTISGMEAEDAATYYCQQWSSNPFTFGSGTKLEINRTVAAPDIQMTQTTSSLSASLGDRVTISCRASQDISKTLNWYQQKPDGTVKLLIYHTSRLHSGVPSRFSGSGSGTDYSLTISNLEQEDIATYFCQQGNTLPYTFGGGTKLEITR

SEQ ID NO: 920 - protein, 246 aa, Artificial Sequence
  Description of Artificial Sequence: Synthetic polypeptide
EVKLQESGPGLVAPSQSLSVTCTVSGVSLPDYGVSWIRQPPRKGLEWLGVIWGSEGTTYYNSALKSRLTIIKDNSKSQVPLKMNSLQTDDTAIYYCAKHYYYGGSYAMDYWGQGTSVTVSSASTKGPQVQLQQSGAELARPGASVKMSCKASGYTFTRYTMHWVKQRPGQGLEWIGYINPSRGYTNYNQKFKDKATLTTDKSSSTAYMQLSSLTSEDSAVYYCARYYDDHYCLDYWGQGTTLTVSS

SEQ ID NO: 921 - protein, 220 aa, Artificial Sequence
  Description of Artificial Sequence: Synthetic polypeptide
DIQMTQTTSSLSASLGDRVTISCRASQDISKTLNWYQQKPDGTVKLLIYHTSRLHSGVPSRFSGSGSGTDYSLTISNLEQEDIATYFCQQGNTLPYTFGGGTKLEITRTVAAPQIVLTQSPAIMSASPGEKVTMTCSASSSVSYMNWYQQKSGTSPKRWIYDTSKLASGVPAHFRGSGSGTSYSLTISGMEAEDAATYYCQQWSSNPFTFGSGTKLEINR

SEQ ID NO: 922 - protein, 238 aa, Artificial Sequence
  Description of Artificial Sequence: Synthetic polypeptide
EVQLVESGGGLVQPGKSLKLSCEASGFTFSGYGMHWVRQAPGRGLESVAYITSSSINIKYADAVKGRFTVSRDNAKNLLFLQMNILKSEDTAMYYCARFDWDKNYWGQGTMVTVSSASTKGPEVQLQQSGAELVRPGTSVKLSCKVSGDTITFYYMHFVKQRPGQGLEWIGRIDPEDESTKYSEKFKNKATLTADTSSNTAYLKLSSLTSEDTATYFCIYGGYYFDYWGQGVMVTVSS

SEQ ID NO: 923 - protein, 221 aa, Artificial Sequence
  Description of Artificial Sequence: Synthetic polypeptide
DIQMTQSPSSLPASLGDRVTINCQASQDISNYLNWYQQKPGKAPKLLIYYTNKLADGVPSRFSGSGSGRDSSFTISSLESEDIGSYYCQQYYNYPWTFGPGTKLEIKRTVAAPDIQMTQSPASLSTSLGETVTIQCQASEDIYSGLAWYQQKPGKSPQLLIYGASDLQDGVPSRFSGSGSGTQYSLKITSMQTEDEGVYFCQQGLTYPRTFGGGTKLELKR

SEQ ID NO: 924 - protein, 238 aa, Artificial Sequence
  Description of Artificial Sequence: Synthetic polypeptide
EVQLQQSGAELVRPGTSVKLSCKVSGDTITFYYMHFVKQRPGQGLEWIGRIDPEDESTKYSEKFKNKATLTADTSSNTAYLKLSSLTSEDTATYFCIYGGYYFDYWGQGVMVTVSSASTKGPEVQLVESGGGLVQPGKSLKLSCEASGFTFSGYGMHWVRQAPGRGLESVAYITSSSINIKYADAVKGRFTVSRDNAKNLLFLQMNILKSEDTAMYYCARFDWDKNYWGQGTMVTVSS

SEQ ID NO: 925 - protein, 221 aa, Artificial Sequence
  Description of Artificial Sequence: Synthetic polypeptide
DIQMTQSPASLSTSLGETVTIQCQASEDIYSGLAWYQQKPGKSPQLLIYGASDLQDGVPSRFSGSGSGTQYSLKITSMQTEDEGVYFCQQGLTYPRTFGGGTKLELKRTVAAPDIQMTQSPSSLPASLGDRVTINCQASQDISNYLNWYQQKPGKAPKLLIYYTNKLADGVPSRFSGSGSGRDSSFTISSLESEDIGSYYCQQYYNYPWTFGPGTKLEIKR

SEQ ID NO: 926 - protein, 245 aa, Artificial Sequence
  Description of Artificial Sequence: Synthetic polypeptide
EVQLVESGGGLVQPGKSLKLSCEASGFTFSGYGMHWVRQAPGRGLESVAYITSSSINIKYADAVKGRFTVSRDNAKNLLFLQMNILKSEDTAMYYCARFDWDKNYWGQGTMVTVSSASTKGPSVFPLAPEVQLQQSGAELVRPGTSVKLSCKVSGDTITFYYMHFVKQRPGQGLEWIGRIDPEDESTKYSEKFKNKATLTADTSSNTAYLKLSSLTSEDTATYFCIYGGYYFDYWGQGVMVTVSS

SEQ ID NO: 927 - protein, 228 aa, Artificial Sequence
  Description of Artificial Sequence: Synthetic polypeptide
DIQMTQSPSSLPASLGDRVTINCQASQDISNYLNWYQQKPGKAPKLLIYYTNKLADGVPSRFSGSGSGRDSSFTISSLESEDIGSYYCQQYYNYPWTFGPGTKLEIKRTVAAPSVFIFPPDIQMTQSPASLSTSLGETVTIQCQASEDIYSGLAWYQQKPGKSPQLLIYGASDLQDGVPSRFSGSGSGTQYSLKITSMQTEDEGVYFCQQGLTYPRTFGGGTKLELKR

SEQ ID NO: 928 - protein, 245 aa, Artificial Sequence
  Description of Artificial Sequence: Synthetic polypeptide
EVQLQQSGAELVRPGTSVKLSCKVSGDTITFYYMHFVKQRPGQGLEWIGRIDPEDESTKYSEKFKNKATLTADTSSNTAYLKLSSLTSEDTATYFCIYGGYYFDYWGQGVMVTVSSASTKGPSVFPLAPEVQLVESGGGLVQPGKSLKLSCEASGFTFSGYGMHWVRQAPGRGLESVAYITSSSINIKYADAVKGRFTVSRDNAKNLLFLQMNILKSEDTAMYYCARFDWDKNYWGQGTMVTVSS

SEQ ID NO: 929 - protein, 228 aa, Artificial Sequence
  Description of Artificial Sequence: Synthetic polypeptide
DIQMTQSPASLSTSLGETVTIQCQASEDIYSGLAWYQQKPGKSPQLLIYGASDLQDGVPSRFSGSGSGTQYSLKITSMQTEDEGVYFCQQGLTYPRTFGGGTKLELKRTVAAPSVFIFPPDIQMTQSPSSLPASLGDRVTINCQASQDISNYLNWYQQKPGKAPKLLIYYTNKLADGVPSRFSGSGSGRDSSFTISSLESEDIGSYYCQQYYNYPWTFGPGTKLEIKR

SEQ ID NO: 930 - DNA, 7185 bp, Artificial Sequence
  Description of Artificial Sequence: Synthetic polynucleotide
gcgtcgaccaagggcccatcggtcttccccctggcaccctcctccaagagcacctctgggggcacagcggccctgggctgcctggtcaaggactacttccccgaaccggtgacggtgtcgtggaactcaggcgccctgaccagcggcgtgcacaccttcccggctgtcctacagtcctcaggactctactccctcagcagcgtggtgaccgtgccctccagcagcttgggcacccagacctacatctgcaacgtgaatcacaagcccagcaacaccaaggtggacaagaaagttgagcccaaatcttgtgacaaaactcacacatgcccaccgtgcccagcacctgaactcctggggggaccgtcagtcttcctcttccccccaaaacccaaggacaccctcatgatctcccggacccctgaggtcacatgcgtggtggtggacgtgagccacgaagaccctgaggtcaagttcaactggtacgtggacggcgtggaggtgcataatgccaagacaaagccgcgggaggagcagtacaacagcacgtaccgtgtggtcagcgtcctcaccgtcctgcaccaggactggctgaatggcaaggagtacaagtgcaaggtctccaacaaagccctcccagcccccatcgagaaaaccatctccaaagccaaagggcagccccgagaaccacaggtgtacaccctgcccccatcccgcgaggagatgaccaagaaccaggtcagcctgacctgcctggtcaaaggcttctatcccagcgacatcgccgtggagtgggagagcaatgggcagccggagaacaactacaagaccacgcctcccgtgctggactccgacggctccttcttcctctacagcaagctcaccgtggacaagagcaggtggcagcaggggaacgtcttctcatgctccgtgatgcatgaggctctgcacaaccactacacgcagaagagcctctccctgtctccgggtaaatgagcggccgctcgaggccggcaaggccggatcccccgacctcgacctctggctaataaaggaaatttattttcattgcaatagtgtgttggaattttttgtgtctctcactcggaaggacatatgggagggcaaatcatttggtcgagatccctcggagatctctagctagaggatcgatccccgccccggacgaactaaacctgactacgacatctctgccccttcttcgcggggcagtgcatgtaatcccttcagttggttggtacaacttgccaactgggccctgttccacatgtgacacggggggggaccaaacacaaaggggttctctgactgtagttgacatccttataaatggatgtgcacatttgccaacactgagtggctttcatcctggagcagactttgcagtctgtggactgcaacacaacattgcctttatgtgtaactcttggctgaagctcttacaccaatgctgggggacatgtacctcccaggggcccaggaagactacgggaggctacaccaacgtcaatcagaggggcctgtgtagctaccgataagcggaccctcaagagggcattagcaatagtgtttataaggcccccttgttaaccctaaacgggtagcatatgcttcccgggtagtagtatatactatccagactaaccctaattcaatagcatatgttacccaacgggaagcatatgctatcgaattagggttagtaaaagggtcctaaggaacagcgatatctcccaccccatgagctgtcacggttttatttacatggggtcaggattccacgagggtagtgaaccattttagtcacaagggcagtggctgaagatcaaggagcgggcagtgaactctcctgaatcttcgcctgcttcttcattctccttcgtttagctaatagaataactgctgagttgtgaacagtaaggtgtatgtgaggtgctcgaaaacaaggtttcaggtgacgcccccagaataaaatttggacggggggttcagtggtggcattgtgctatgacaccaatataaccctcacaaaccccttgggcaataaatactagtgtaggaatgaaacattctgaatatctttaacaatagaaatccatggggtggggacaagccgtaaagactggatgtccatctcacacgaatttatggctatgggcaacacataatcctagtgcaatatgatactggggttattaagatgtgtcccaggcagggaccaagacaggtgaaccatgttgttacactctatttgtaacaaggggaaagagagtggacgccgacagcagcggactccactggttgtctctaacacccccgaaaattaaacggggctccacgccaatggggcccataaacaaagacaagtggccactcttttttttgaaattgtggagtgggggcacgcgtcagcccccacacgccgccctgcggttttggactgtaaaataagggtgtaataacttggctgattgtaaccccgctaaccactgcggtcaaaccacttgcccacaaaaccactaatggcaccccggggaatacctgcataagtaggtgggcgggccaagataggggcgcgattgctgcgatctggaggacaaattacacacacttgcgcctgagcgccaagcacagggttgttggtcctcatattcacgaggtcgctgagagcacggtgggctaatgttgccatgggtagcatatactacccaaatatctggatagcatatgctatcctaatctatatctgggtagcataggctatcctaatctatatctgggtagcatatgctatcctaatctatatctgggtagtatatgctatcctaatttatatctgggtagcataggctatcctaatctatatctgggtagcatatgctatcctaatctatatctgggtagtatatgctatcctaatctgtatccgggtagcatatgctatcctaatagagattagggtagtatatgctatcctaatttatatctgggtagcatatactacccaaatatctggatagcatatgctatcctaatctatatctgggtagcatatgctatcctaatctatatctgggtagcataggctatcctaatctatatctgggtagcatatgctatcctaatctatatctgggtagtatatgctatcctaatttatatctgggtagcataggctatcctaatctatatctgggtagcatatgctatcctaatctatatctgggtagtatatgctatcctaatctgtatccgggtagcatatgctatcctcatgataagctgtcaaacatgagaattttcttgaagacgaaagggcctcgtgatacgcctatttttataggttaatgtcatgataataatggtttcttagacgtcaggtggcacttttcggggaaatgtgcgcggaacccctatttgtttatttttctaaatacattcaaatatgtatccgctcatgagacaataaccctgataaatgcttcaataatattgaaaaaggaagagtatgagtattcaacatttccgtgtcgcccttattcccttttttgcggcattttgccttcctgtttttgctcacccagaaacgctggtgaaagtaaaagatgctgaagatcagttgggtgcacgagtgggttacatcgaactggatctcaacagcggtaagatccttgagagttttcgccccgaagaacgttttccaatgatgagcacttttaaagttctgctatgtggcgcggtattatcccgtgttgacgccgggcaagagcaactcggtcgccgcatacactattctcagaatgacttggttgagtactcaccagtcacagaaaagcatcttacggatggcatgacagtaagagaattatgcagtgctgccataaccatgagtgataacactgcggccaacttacttctgacaacgatcggaggaccgaaggagctaaccgcttttttgcacaacatgggggatcatgtaactcgccttgatcgttgggaaccggagctgaatgaagccataccaaacgacgagcgtgacaccacgatgcctgcagcaatggcaacaacgttgcgcaaactattaactggcgaactacttactctagcttcccggcaacaattaatagactggatggaggcggataaagttgcaggaccacttctgcgctcggcccttccggctggctggtttattgctgataaatctggagccggtgagcgtgggtctcgcggtatcattgcagcactggggccagatggtaagccctcccgtatcgtagttatctacacgacggggagtcaggcaactatggatgaacgaaatagacagatcgctgagataggtgcctcactgattaagcattggtaactgtcagaccaagtttactcatatatactttagattgatttaaaacttcatttttaatttaaaaggatctaggtgaagatcctttttgataatctcatgaccaaaatcccttaacgtgagttttcgttccactgagcgtcagaccccgtagaaaagatcaaaggatcttcttgagatcctttttttctgcgcgtaatctgctgcttgcaaacaaaaaaaccaccgctaccagcggtggtttgtttgccggatcaagagctaccaactctttttccgaaggtaactggcttcagcagagcgcagataccaaatactgttcttctagtgtagccgtagttaggccaccacttcaagaactctgtagcaccgcctacatacctcgctctgctaatcctgttaccagtggctgctgccagtggcgataagtcgtgtcttaccgggttggactcaagacgatagttaccggataaggcgcagcggtcgggctgaacggggggttcgtgcacacagcccagcttggagcgaacgacctacaccgaactgagatacctacagcgtgagctatgagaaagcgccacgcttcccgaagggagaaaggcggacaggtatccggtaagcggcagggtcggaacaggagagcgcacgagggagcttccagggggaaacgcctggtatctttatagtcctgtcgggtttcgccacctctgacttgagcgtcgatttttgtgatgctcgtcaggggggcggagcctatggaaaaacgccagcaacgcggcctttttacggttcctggccttttgctggccttttgctcacatgttctttcctgcgttatcccctgattctgtggataaccgtattaccgcctttgagtgagctgataccgctcgccgcagccgaacgaccgagcgcagcgagtcagtgagcgaggaagcggaagagcgcccaatacgcaaaccgcctctccccgcgcgttggccgattcattaatgcagctggcacgacaggtttcccgactggaaagcgggcagtgagcgcaacgcaattaatgtgagttagctcactcattaggcaccccaggctttacactttatgcttccggctcgtatgttgtgtggaattgtgagcggataacaatttcacacaggaaacagctatgaccatgattacgccaagctctagctagaggtcgagtccctccccagcaggcagaagtatgcaaagcatgcatctcaattagtcagcaaccatagtcccgcccctaactccgcccatcccgcccctaactccgcccagttccgcccattctccgccccatggctgactaattttttttatttatgcagaggccgaggccgcctcggcctctgagctattccagaagtagtgaggaggcttttttggaggcctaggcttttgcaaaaagctttgcaaagatggataaagttttaaacagagaggaatctttgcagctaatggaccttctaggtcttgaaaggagtgggaattggctccggtgcccgtcagtgggcagagcgcacatcgcccacagtccccgagaagttggggggaggggtcggcaattgaaccggtgcctagagaaggtggcgcggggtaaactgggaaagtgatgtcgtgtactggctccgcctttttcccgagggtgggggagaaccgtatataagtgcagtagtcgccgtgaacgttctttttcgcaacgggtttgccgccagaacacaggtaagtgccgtgtgtggttcccgcgggcctggcctctttacgggttatggcccttgcgtgccttgaattacttccacctggctgcagtacgtgattcttgatcccgagcttcgggttggaagtgggtgggagagttcgaggccttgcgcttaaggagccccttcgcctcgtgcttgagttgaggcctggcctgggcgctggggccgccgcgtgcgaatctggtggcaccttcgcgcctgtctcgctgctttcgataagtctctagccatttaaaatttttgatgacctgctgcgacgctttttttctggcaagatagtcttgtaaatgcgggccaagatctgcacactggtatttcggtttttggggccgcgggcggcgacggggcccgtgcgtcccagcgcacatgttcggcgaggcggggcctgcgagcgcggccaccgagaatcggacgggggtagtctcaagctggccggcctgctctggtgcctggcctcgcgccgccgtgtatcgccccgccctgggcggcaaggctggcccggtcggcaccagttgcgtgagcggaaagatggccgcttcccggccctgctgcagggagctcaaaatggaggacgcggcgctcgggagagcgggcgggtgagtcacccacacaaaggaaaagggcctttccgtcctcagccgtcgcttcatgtgactccacggagtaccgggcgccgtccaggcacctcgattagttctcgagcttttggagtacgtcgtctttaggttggggggaggggttttatgcgatggagtttccccacactgagtgggtggagactgaagttaggccagcttggcacttgatgtaattctccttggaatttgccctttttgagtttggatcttggttcattctcaagcctcagacagtggttcaaagtttttttcttccatttcaggtgtcgtgaggaattctctagagatccctcgacctcgagatccattgtgcccgggcgccaccatggagtttgggctgagctggctttttcttgtcgcgattttaaaaggtgtccagtgc

SEQ ID NO: 931 - DNA, 6521 bp, Artificial Sequence
  Description of Artificial Sequence: Synthetic polynucleotide
acggtggctgcaccatctgtcttcatcttcccgccatctgatgagcagttgaaatctggaactgcctctgttgtgtgcctgctgaataacttctatcccagagaggccaaagtacagtggaaggtggataacgccctccaatcgggtaactcccaggagagtgtcacagagcaggacagcaaggacagcacctacagcctcagcagcaccctgacgctgagcaaagcagactacgagaaacacaaagtctacgcctgcgaagtcacccatcagggcctgagctcgcccgtcacaaagagcttcaacaggggagagtgttgagcggccgctcgaggccggcaaggccggatcccccgacctcgacctctggctaataaaggaaatttattttcattgcaatagtgtgttggaattttttgtgtctctcactcggaaggacatatgggagggcaaatcatttggtcgagatccctcggagatctctagctagaggatcgatccccgccccggacgaactaaacctgactacgacatctctgccccttcttcgcggggcagtgcatgtaatcccttcagttggttggtacaacttgccaactgggccctgttccacatgtgacacggggggggaccaaacacaaaggggttctctgactgtagttgacatccttataaatggatgtgcacatttgccaacactgagtggctttcatcctggagcagactttgcagtctgtggactgcaacacaacattgcctttatgtgtaactcttggctgaagctcttacaccaatgctgggggacatgtacctcccaggggcccaggaagactacgggaggctacaccaacgtcaatcagaggggcctgtgtagctaccgataagcggaccctcaagagggcattagcaatagtgtttataaggcccccttgttaaccctaaacgggtagcatatgcttcccgggtagtagtatatactatccagactaaccctaattcaatagcatatgttacccaacgggaagcatatgctatcgaattagggttagtaaaagggtcctaaggaacagcgatatctcccaccccatgagctgtcacggttttatttacatggggtcaggattccacgagggtagtgaaccattttagtcacaagggcagtggctgaagatcaaggagcgggcagtgaactctcctgaatcttcgcctgcttcttcattctccttcgtttagctaatagaataactgctgagttgtgaacagtaaggtgtatgtgaggtgctcgaaaacaaggtttcaggtgacgcccccagaataaaatttggacggggggttcagtggtggcattgtgctatgacaccaatataaccctcacaaaccccttgggcaataaatactagtgtaggaatgaaacattctgaatatctttaacaatagaaatccatggggtggggacaagccgtaaagactggatgtccatctcacacgaatttatggctatgggcaacacataatcctagtgcaatatgatactggggttattaagatgtgtcccaggcagggaccaagacaggtgaaccatgttgttacactctatttgtaacaaggggaaagagagtggacgccgacagcagcggactccactggttgtctctaacacccccgaaaattaaacggggctccacgccaatggggcccataaacaaagacaagtggccactcttttttttgaaattgtggagtgggggcacgcgtcagcccccacacgccgccctgcggttttggactgtaaaataagggtgtaataacttggctgattgtaaccccgctaaccactgcggtcaaaccacttgcccacaaaaccactaatggcaccccggggaatacctgcataagtaggtgggcgggccaagataggggcgcgattgctgcgatctggaggacaaattacacacacttgcgcctgagcgccaagcacagggttgttggtcctcatattcacgaggtcgctgagagcacggtgggctaatgttgccatgggtagcatatactacccaaatatctggatagcatatgctatcctaatctatatctgggtagcataggctatcctaatctatatctgggtagcatatgctatcctaatctatatctgggtagtatatgctatcctaatttatatctgggtagcataggctatcctaatctatatctgggtagcatatgctatcctaatctatatctgggtagtatatgctatcctaatctgtatccgggtagcatatgctatcctaatagagattagggtagtatatgctatcctaatttatatctgggtagcatatactacccaaatatctggatagcatatgctatcctaatctatatctgggtagcatatgctatcctaatctatatctgggtagcataggctatcctaatctatatctgggtagcatatgctatcctaatctatatctgggtagtatatgctatcctaatttatatctgggtagcataggctatcctaatctatatctgggtagcatatgctatcctaatctatatctgggtagtatatgctatcctaatctgtatccgggtagcatatgctatcctcatgataagctgtcaaacatgagaattttcttgaagacgaaagggcctcgtgatacgcctatttttataggttaatgtcatgataataatggtttcttagacgtcaggtggcacttttcggggaaatgtgcgcggaacccctatttgtttatttttctaaatacattcaaatatgtatccgctcatgagacaataaccctgataaatgcttcaataatattgaaaaaggaagagtatgagtattcaacatttccgtgtcgcccttattcccttttttgcggcattttgccttcctgtttttgctcacccagaaacgctggtgaaagtaaaagatgctgaagatcagttgggtgcacgagtgggttacatcgaactggatctcaacagcggtaagatccttgagagttttcgccccgaagaacgttttccaatgatgagcacttttaaagttctgctatgtggcgcggtattatcccgtgttgacgccgggcaagagcaactcggtcgccgcatacactattctcagaatgacttggttgagtactcaccagtcacagaaaagcatcttacggatggcatgacagtaagagaattatgcagtgctgccataaccatgagtgataacactgcggccaacttacttctgacaacgatcggaggaccgaaggagctaaccgcttttttgcacaacatgggggatcatgtaactcgccttgatcgttgggaaccggagctgaatgaagccataccaaacgacgagcgtgacaccacgatgcctgcagcaatggcaacaacgttgcgcaaactattaactggcgaactacttactctagcttcccggcaacaattaatagactggatggaggcggataaagttgcaggaccacttctgcgctcggcccttccggctggctggtttattgctgataaatctggagccggtgagcgtgggtctcgcggtatcattgcagcactggggccagatggtaagccctcccgtatcgtagttatctacacgacggggagtcaggcaactatggatgaacgaaatagacagatcgctgagataggtgcctcactgattaagcattggtaactgtcagaccaagtttactcatatatactttagattgatttaaaacttcatttttaatttaaaaggatctaggtgaagatcctttttgataatctcatgaccaaaatcccttaacgtgagttttcgttccactgagcgtcagaccccgtagaaaagatcaaaggatcttcttgagatcctttttttctgcgcgtaatctgctgcttgcaaacaaaaaaaccaccgctaccagcggtggtttgtttgccggatcaagagctaccaactctttttccgaaggtaactggcttcagcagagcgcagataccaaatactgttcttctagtgtagccgtagttaggccaccacttcaagaactctgtagcaccgcctacatacctcgctctgctaatcctgttaccagtggctgctgccagtggcgataagtcgtgtcttaccgggttggactcaagacgatagttaccggataaggcgcagcggtcgggctgaacggggggttcgtgcacacagcccagcttggagcgaacgacctacaccgaactgagatacctacagcgtgagctatgagaaagcgccacgcttcccgaagggagaaaggcggacaggtatccggtaagcggcagggtcggaacaggagagcgcacgagggagcttccagggggaaacgcctggtatctttatagtcctgtcgggtttcgccacctctgacttgagcgtcgatttttgtgatgctcgtcaggggggcggagcctatggaaaaacgccagcaacgcggcctttttacggttcctggccttttgctggccttttgctcacatgttctttcctgcgttatcccctgattctgtggataaccgtattaccgcctttgagtgagctgataccgctcgccgcagccgaacgaccgagcgcagcgagtcagtgagcgaggaagcggaagagcgcccaatacgcaaaccgcctctccccgcgcgttggccgattcattaatgcagctggcacgacaggtttcccgactggaaagcgggcagtgagcgcaacgcaattaatgtgagttagctcactcattaggcaccccaggctttacactttatgcttccggctcgtatgttgtgtggaattgtgagcggataacaatttcacacaggaaacagctatgaccatgattacgccaagctctagctagaggtcgagtccctccccagcaggcagaagtatgcaaagcatgcatctcaattagtcagcaaccatagtcccgcccctaactccgcccatcccgcccctaactccgcccagttccgcccattctccgccccatggctgactaattttttttatttatgcagaggccgaggccgcctcggcctctgagctattccagaagtagtgaggaggcttttttggaggcctaggcttttgcaaaaagctttgcaaagatggataaagttttaaacagagaggaatctttgcagctaatggaccttctaggtcttgaaaggagtgggaattggctccggtgcccgtcagtgggcagagcgcacatcgcccacagtccccgagaagttggggggaggggtcggcaattgaaccggtgcctagagaaggtggcgcggggtaaactgggaaagtgatgtcgtgtactggctccgcctttttcccgagggtgggggagaaccgtatataagtgcagtagtcgccgtgaacgttctttttcgcaacgggtttgccgccagaacacaggtaagtgccgtgtgtggttcccgcgggcctggcctctttacgggttatggcccttgcgtgccttgaattacttccacctggctgcagtacgtgattcttgatcccgagcttcgggttggaagtgggtgggagagttcgaggccttgcgcttaaggagccccttcgcctcgtgcttgagttgaggcctggcctgggcgctggggccgccgcgtgcgaatctggtggcaccttcgcgcctgtctcgctgctttcgataagtctctagccatttaaaatttttgatgacctgctgcgacgctttttttctggcaagatagtcttgtaaatgcgggccaagatctgcacactggtatttcggtttttggggccgcgggcggcgacggggcccgtgcgtcccagcgcacatgttcggcgaggcggggcctgcgagcgcggccaccgagaatcggacgggggtagtctcaagctggccggcctgctctggtgcctggcctcgcgccgccgtgtatcgccccgccctgggcggcaaggctggcccggtcggcaccagttgcgtgagcggaaagatggccgcttcccggccctgctgcagggagctcaaaatggaggacgcggcgctcgggagagcgggcgggtgagtcacccacacaaaggaaaagggcctttccgtcctcagccgtcgcttcatgtgactccacggagtaccgggcgccgtccaggcacctcgattagttctcgagcttttggagtacgtcgtctttaggttggggggaggggttttatgcgatggagtttccccacactgagtgggtggagactgaagttaggccagcttggcacttgatgtaattctccttggaatttgccctttttgagtttggatcttggttcattctcaagcctcagacagtggttcaaagtttttttcttccatttcaggtgtcgtgaggaattctctagagatccctcgacctcgagatccattgtgcccgggcgcaccatggacatgcgcgtgcccgcccagctgctgggcctgctgctgctgtggttccccggctcgcgatgc

SEQ ID NO: 932 - DNA, 6513 bp, Artificial Sequence
  Description of Artificial Sequence: Synthetic polynucleotide
caacccaaggctgccccctcggtcactctgttcccgccctcctctgaggagcttcaagccaacaaggccacactggtgtgtctcataagtgacttctacccgggagccgtgacagtggcctggaaggcagatagcagccccgtcaaggcgggagtggagaccaccacaccctccaaacaaagcaacaacaagtacgcggccagcagctacctgagcctgacgcctgagcagtggaagtcccacagaagctacagctgccaggtcacgcatgaagggagcaccgtggagaagacagtggcccctacagaatgttcatgagcggccgctcgaggccggcaaggccggatcccccgacctcgacctctggctaataaaggaaatttattttcattgcaatagtgtgttggaattttttgtgtctctcactcggaaggacatatgggagggcaaatcatttggtcgagatccctcggagatctctagctagaggatcgatccccgccccggacgaactaaacctgactacgacatctctgccccttcttcgcggggcagtgcatgtaatcccttcagttggttggtacaacttgccaactgggccctgttccacatgtgacacggggggggaccaaacacaaaggggttctctgactgtagttgacatccttataaatggatgtgcacatttgccaacactgagtggctttcatcctggagcagactttgcagtctgtggactgcaacacaacattgcctttatgtgtaactcttggctgaagctcttacaccaatgctgggggacatgtacctcccaggggcccaggaagactacgggaggctacaccaacgtcaatcagaggggcctgtgtagctaccgataagcggaccctcaagagggcattagcaatagtgtttataaggcccccttgttaaccctaaacgggtagcatatgcttcccgggtagtagtatatactatccagactaaccctaattcaatagcatatgttacccaacgggaagcatatgctatcgaattagggttagtaaaagggtcctaaggaacagcgatatctcccaccccatgagctgtcacggttttatttacatggggtcaggattccacgagggtagtgaaccattttagtcacaagggcagtggctgaagatcaaggagcgggcagtgaactctcctgaatcttcgcctgcttcttcattctccttcgtttagctaatagaataactgctgagttgtgaacagtaaggtgtatgtgaggtgctcgaaaacaaggtttcaggtgacgcccccagaataaaatttggacggggggttcagtggtggcattgtgctatgacaccaatataaccctcacaaaccccttgggcaataaatactagtgtaggaatgaaacattctgaatatctttaacaatagaaatccatggggtggggacaagccgtaaagactggatgtccatctcacacgaatttatggctatgggcaacacataatcctagtgcaatatgatactggggttattaagatgtgtcccaggcagggaccaagacaggtgaaccatgttgttacactctatttgtaacaaggggaaagagagtggacgccgacagcagcggactccactggttgtctctaacacccccgaaaattaaacggggctccacgccaatggggcccataaacaaagacaagtggccactcttttttttgaaattgtggagtgggggcacgcgtcagcccccacacgccgccctgcggttttggactgtaaaataagggtgtaataacttggctgattgtaaccccgctaaccactgcggtcaaaccacttgcccacaaaaccactaatggcaccccggggaatacctgcataagtaggtgggcgggccaagataggggcgcgattgctgcgatctggaggacaaattacacacacttgcgcctgagcgccaagcacagggttgttggtcctcatattcacgaggtcgctgagagcacggtgggctaatgttgccatgggtagcatatactacccaaatatctggatagcatatgctatcctaatctatatctgggtagcataggctatcctaatctatatctgggtagcatatgctatcctaatctatatctgggtagtatatgctatcctaatttatatctgggtagcataggctatcctaatctatatctgggtagcatatgctatcctaatctatatctgggtagtatatgctatcctaatctgtatccgggtagcatatgctatcctaatagagattagggtagtatatgctatcctaatttatatctgggtagcatatactacccaaatatctggatagcatatgctatcctaatctatatctgggtagcatatgctatcctaatctatatctgggtagcataggctatcctaatctatatctgggtagcatatgctatcctaatctatatctgggtagtatatgctatcctaatttatatctgggtagcataggctatcctaatctatatctgggtagcatatgctatcctaatctatatctgggtagtatatgctatcctaatctgtatccgggtagcatatgctatcctcatgataagctgtcaaacatgagaattttcttgaagacgaaagggcctcgtgatacgcctatttttataggttaatgtcatgataataatggtttcttagacgtcaggtggcacttttcggggaaatgtgcgcggaacccctatttgtttatttttctaaatacattcaaatatgtatccgctcatgagacaataaccctgataaatgcttcaataatattgaaaaaggaagagtatgagtattcaacatttccgtgtcgcccttattcccttttttgcggcattttgccttcctgtttttgctcacccagaaacgctggtgaaagtaaaagatgctgaagatcagttgggtgcacgagtgggttacatcgaactggatctcaacagcggtaagatccttgagagttttcgccccgaagaacgttttccaatgatgagcacttttaaagttctgctatgtggcgcggtattatcccgtgttgacgccgggcaagagcaactcggtcgccgcatacactattctcagaatgacttggttgagtactcaccagtcacagaaaagcatcttacggatggcatgacagtaagagaattatgcagtgctgccataaccatgagtgataacactgcggccaacttacttctgacaacgatcggaggaccgaaggagctaaccgcttttttgcacaacatgggggatcatgtaactcgccttgatcgttgggaaccggagctgaatgaagccataccaaacgacgagcgtgacaccacgatgcctgcagcaatggcaacaacgttgcgcaaactattaactggcgaactacttactctagcttcccggcaacaattaatagactggatggaggcggataaagttgcaggaccacttctgcgctcggcccttccggctggctggtttattgctgataaatctggagccggtgagcgtgggtctcgcggtatcattgcagcactggggccagatggtaagccctcccgtatcgtagttatctacacgacggggagtcaggcaactatggatgaacgaaatagacagatcgctgagataggtgcctcactgattaagcattggtaactgtcagaccaagtttactcatatatactttagattgatttaaaacttcatttttaatttaaaaggatctaggtgaagatcctttttgataatctcatgaccaaaatcccttaacgtgagttttcgttccactgagcgtcagaccccgtagaaaagatcaaaggatcttcttgagatcctttttttctgcgcgtaatctgctgcttgcaaacaaaaaaaccaccgctaccagcggtggtttgtttgccggatcaagagctaccaactctttttccgaaggtaactggcttcagcagagcgcagataccaaatactgttcttctagtgtagccgtagttaggccaccacttcaagaactctgtagcaccgcctacatacctcgctctgctaatcctgttaccagtggctgctgccagtggcgataagtcgtgtcttaccgggttggactcaagacgatagttaccggataaggcgcagcggtcgggctgaacggggggttcgtgcacacagcccagcttggagcgaacgacctacaccgaactgagatacctacagcgtgagctatgagaaagcgccacgcttcccgaagggagaaaggcggacaggtatccggtaagcggcagggtcggaacaggagagcgcacgagggagcttccagggggaaacgcctggtatctttatagtcctgtcgggtttcgccacctctgacttgagcgtcgatttttgtgatgctcgtcaggggggcggagcctatggaaaaacgccagcaacgcggcctttttacggttcctggccttttgctggccttttgctcacatgttctttcctgcgttatcccctgattctgtggataaccgtattaccgcctttgagtgagctgataccgctcgccgcagccgaacgaccgagcgcagcgagtcagtgagcgaggaagcggaagagcgcccaatacgcaaaccgcctctccccgcgcgttggccgattcattaatgcagctggcacgacaggtttcccgactggaaagcgggcagtgagcgcaacgcaattaatgtgagttagctcactcattaggcaccccaggctttacactttatgcttccggctcgtatgttgtgtggaattgtgagcggataacaatttcacacaggaaacagctatgaccatgattacgccaagctctagctagaggtcgagtccctccccagcaggcagaagtatgcaaagcatgcatctcaattagtcagcaaccatagtcccgcccctaactccgcccatcccgcccctaactccgcccagttccgcccattctccgccccatggctgactaattttttttatttatgcagaggccgaggccgcctcggcctctgagctattccagaagtagtgaggaggcttttttggaggcctaggcttttgcaaaaagctttgcaaagatggataaagttttaaacagagaggaatctttgcagctaatggaccttctaggtcttgaaaggagtgggaattggctccggtgcccgtcagtgggcagagcgcacatcgcccacagtccccgagaagttggggggaggggtcggcaattgaaccggtgcctagagaaggtggcgcggggtaaactgggaaagtgatgtcgtgtactggctccgcctttttcccgagggtgggggagaaccgtatataagtgcagtagtcgccgtgaacgttctttttcgcaacgggtttgccgccagaacacaggtaagtgccgtgtgtggttcccgcgggcctggcctctttacgggttatggcccttgcgtgccttgaattacttccacctggctgcagtacgtgattcttgatcccgagcttcgggttggaagtgggtgggagagttcgaggccttgcgcttaaggagccccttcgcctcgtgcttgagttgaggcctggcctgggcgctggggccgccgcgtgcgaatctggtggcaccttcgcgcctgtctcgctgctttcgataagtctctagccatttaaaatttttgatgacctgctgcgacgctttttttctggcaagatagtcttgtaaatgcgggccaagatctgcacactggtatttcggtttttggggccgcgggcggcgacggggcccgtgcgtcccagcgcacatgttcggcgaggcggggcctgcgagcgcggccaccgagaatcggacgggggtagtctcaagctggccggcctgctctggtgcctggcctcgcgccgccgtgtatcgccccgccctgggcggcaaggctggcccggtcggcaccagttgcgtgagcggaaagatggccgcttcccggccctgctgcagggagctcaaaatggaggacgcggcgctcgggagagcgggcgggtgagtcacccacacaaaggaaaagggcctttccgtcctcagccgtcgcttcatgtgactccacggagtaccgggcgccgtccaggcacctcgattagttctcgagcttttggagtacgtcgtctttaggttggggggaggggttttatgcgatggagtttccccacactgagtgggtggagactgaagttaggccagcttggcacttgatgtaattctccttggaatttgccctttttgagtttggatcttggttcattctcaagcctcagacagtggttcaaagtttttttcttccatttcaggtgtcgtgaggaattctctagagatccctcgacctcgagatccattgtgcccgggcgccaccatgacttggaccccactcctcttcctcaccctcctcctccactgcacaggaagcttatcg

SEQ ID NO: 933 - DNA, 6515 bp, Artificial Sequence
  Description of Artificial Sequence: Synthetic polynucleotide
acggtggctgcaccatctgtcttcatcttcccgccatctgatgagcagttgaaatctggaactgcctctgttgtgtgcctgctgaataacttctatcccagagaggccaaagtacagtggaaggtggataacgccctccaatcgggtaactcccaggagagtgtcacagagcaggacagcaaggacagcacctacagcctcagcagcaccctgacgctgagcaaagcagactacgagaaacacaaagtctacgcctgcgaagtcacccatcagggcctgagctcgcccgtcacaaagagcttcaacaggggagagtgttgagcggccgctcgaggccggcaaggccggatcccccgacctcgacctctggctaataaaggaaatttattttcattgcaatagtgtgttggaattttttgtgtctctcactcggaaggacatatgggagggcaaatcatttggtcgagatccctcggagatctctagctagaggatcgatccccgccccggacgaactaaacctgactacgacatctctgccccttcttcgcggggcagtgcatgtaatcccttcagttggttggtacaacttgccaactgggccctgttccacatgtgacacggggggggaccaaacacaaaggggttctctgactgtagttgacatccttataaatggatgtgcacatttgccaacactgagtggctttcatcctggagcagactttgcagtctgtggactgcaacacaacattgcctttatgtgtaactcttggctgaagctcttacaccaatgctgggggacatgtacctcccaggggcccaggaagactacgggaggctacaccaacgtcaatcagaggggcctgtgtagctaccgataagcggaccctcaagagggcattagcaatagtgtttataaggcccccttgttaaccctaaacgggtagcatatgcttcccgggtagtagtatatactatccagactaaccctaattcaatagcatatgttacccaacgggaagcatatgctatcgaattagggttagtaaaagggtcctaaggaacagcgatatctcccaccccatgagctgtcacggttttatttacatggggtcaggattccacgagggtagtgaaccattttagtcacaagggcagtggctgaagatcaaggagcgggcagtgaactctcctgaatcttcgcctgcttcttcattctccttcgtttagctaatagaataactgctgagttgtgaacagtaaggtgtatgtgaggtgctcgaaaacaaggtttcaggtgacgcccccagaataaaatttggacggggggttcagtggtggcattgtgctatgacaccaatataaccctcacaaaccccttgggcaataaatactagtgtaggaatgaaacattctgaatatctttaacaatagaaatccatggggtggggacaagccgtaaagactggatgtccatctcacacgaatttatggctatgggcaacacataatcctagtgcaatatgatactggggttattaagatgtgtcccaggcagggaccaagacaggtgaaccatgttgttacactctatttgtaacaaggggaaagagagtggacgccgacagcagcggactccactggttgtctctaacacccccgaaaattaaacggggctccacgccaatggggcccataaacaaagacaagtggccactcttttttttgaaattgtggagtgggggcacgcgtcagcccccacacgccgccctgcggttttggactgtaaaataagggtgtaataacttggctgattgtaaccccgctaaccactgcggtcaaaccacttgcccacaaaaccactaatggcaccccggggaatacctgcataagtaggtgggcgggccaagataggggcgcgattgctgcgatctggaggacaaattacacacacttgcgcctgagcgccaagcacagggttgttggtcctcatattcacgaggtcgctgagagcacggtgggctaatgttgccatgggtagcatatactacccaaatatctggatagcatatgctatcctaatctatatctgggtagcataggctatcctaatctatatctgggtagcatatgctatcctaatctatatctgggtagtatatgctatcctaatttatatctgggtagcataggctatcctaatctatatctgggtagcatatgctatcctaatctatatctgggtagtatatgctatcctaatctgtatccgggtagcatatgctatcctaatagagattagggtagtatatgctatcctaatttatatctgggtagcatatactacccaaatatctggatagcatatgctatcctaatctatatctgggtagcatatgctatcctaatctatatctgggtagcataggctatcctaatctatatctgggtagcatatgctatcctaatctatatctgggtagtatatgctatcctaatttatatctgggtagcataggctatcctaatctatatctgggtagcatatgctatcctaatctatatctgggtagtatatgctatcctaatctgtatccgggtagcatatgctatcctcatgataagctgtcaaacatgagaattttcttgaagacgaaagggcctcgtgatacgcctatttttataggttaatgtcatgataataatggtttcttagacgtcaggtggcacttttcggggaaatgtgcgcggaacccctatttgtttatttttctaaatacattcaaatatgtatccgctcatgagacaataaccctgataaatgcttcaataatattgaaaaaggaagagtatgagtattcaacatttccgtgtcgcccttattcccttttttgcggcattttgccttcctgtttttgctcacccagaaacgctggtgaaagtaaaagatgctgaagatcagttgggtgcacgagtgggttacatcgaactggatctcaacagcggtaagatccttgagagttttcgccccgaagaacgttttccaatgatgagcacttttaaagttctgctatgtggcgcggtattatcccgtgttgacgccgggcaagagcaactcggtcgccgcatacactattctcagaatgacttggttgagtactcaccagtcacagaaaagcatcttacggatggcatgacagtaagagaattatgcagtgctgccataaccatgagtgataacactgcggccaacttacttctgacaacgatcggaggaccgaaggagctaaccgcttttttgcacaacatgggggatcatgtaactcgccttgatcgttgggaaccggagctgaatgaagccataccaaacgacgagcgtgacaccacgatgcctgcagcaatggcaacaacgttgcgcaaactattaactggcgaactacttactctagcttcccggcaacaattaatagactggatggaggcggataaagttgcaggaccacttctgcgctcggcccttccggctggctggtttattgctgataaatctggagccggtgagcgtgggtctcgcggtatcattgcagcactggggccagatggtaagccctcccgtatcgtagttatctacacgacggggagtcaggcaactatggatgaacgaaatagacagatcgctgagataggtgcctcactgattaagcattggtaactgtcagaccaagtttactcatatatactttagattgatttaaaacttcatttttaatttaaaaggatctaggtgaagatcctttttgataatctcatgaccaaaatcccttaacgtgagttttcgttccactgagcgtcagaccccgtagaaaagatcaaaggatcttcttgagatcctttttttctgcgcgtaatctgctgcttgcaaacaaaaaaaccaccgctaccagcggtggtttgtttgccggatcaagagctaccaactctttttccgaaggtaactggcttcagcagagcgcagataccaaatactgttcttctagtgtagccgtagttaggccaccacttcaagaactctgtagcaccgcctacatacctcgctctgctaatcctgttaccagtggctgctgccagtggcgataagtcgtgtcttaccgggttggactcaagacgatagttaccggataaggcgcagcggtcgggctgaacggggggttcgtgcacacagcccagcttggagcgaacgacctacaccgaactgagatacctacagcgtgagctatgagaaagcgccacgcttcccgaagggagaaaggcggacaggtatccggtaagcggcagggtcggaacaggagagcgcacgagggagcttccagggggaaacgcctggtatctttatagtcctgtcgggtttcgccacctctgacttgagcgtcgatttttgtgatgctcgtcaggggggcggagcctatggaaaaacgccagcaacgcggcctttttacggttcctggccttttgctggccttttgctcacatgttctttcctgcgttatcccctgattctgtggataaccgtattaccgcctttgagtgagctgataccgctcgccgcagccgaacgaccgagcgcagcgagtcagtgagcgaggaagcggaagagcgcccaatacgcaaaccgcctctccccgcgcgttggccgattcattaatgcagctggcacgacaggtttcccgactggaaagcgggcagtgagcgcaacgcaattaatgtgagttagctcactcattaggcaccccaggctttacactttatgcttccggctcgtatgttgtgtggaattgtgagcggataacaatttcacacaggaaacagctatgaccatgattacgccaagctctagctagaggtcgagtccctccccagcaggcagaagtatgcaaagcatgcatctcaattagtcagcaaccatagtcccgcccctaactccgcccatcccgcccctaactccgcccagttccgcccattctccgccccatggctgactaattttttttatttatgcagaggccgaggccgcctcggcctctgagctattccagaagtagtgaggaggcttttttggaggcctaggcttttgcaaaaagctttgcaaagatggataaagttttaaacagagaggaatctttgcagctaatggaccttctaggtcttgaaaggagtgggaattggctccggtgcccgtcagtgggcagagcgcacatcgcccacagtccccgagaagttggggggaggggtcggcaattgaaccggtgcctagagaaggtggcgcggggtaaactgggaaagtgatgtcgtgtactggctccgcctttttcccgagggtgggggagaaccgtatataagtgcagtagtcgccgtgaacgttctttttcgcaacgggtttgccgccagaacacaggtaagtgccgtgtgtggttcccgcgggcctggcctctttacgggttatggcccttgcgtgccttgaattacttccacctggctgcagtacgtgattcttgatcccgagcttcgggttggaagtgggtgggagagttcgaggccttgcgcttaaggagccccttcgcctcgtgcttgagttgaggcctggcctgggcgctggggccgccgcgtgcgaatctggtggcaccttcgcgcctgtctcgctgctttcgataagtctctagccatttaaaatttttgatgacctgctgcgacgctttttttctggcaagatagtcttgtaaatgcgggccaagatctgcacactggtatttcggtttttggggccgcgggcggcgacggggcccgtgcgtcccagcgcacatgttcggcgaggcggggcctgcgagcgcggccaccgagaatcggacgggggtagtctcaagctggccggcctgctctggtgcctggcctcgcgccgccgtgtatcgccccgccctgggcggcaaggctggcccggtcggcaccagttgcgtgagcggaaagatggccgcttcccggccctgctgcagggagctcaaaatggaggacgcggcgctcgggagagcgggcgggtgagtcacccacacaaaggaaaagggcctttccgtcctcagccgtcgcttcatgtgactccacggagtaccgggcgccgtccaggcacctcgattagttctcgagcttttggagtacgtcgtctttaggttggggggaggggttttatgcgatggagtttccccacactgagtgggtggagactgaagttaggccagcttggcacttgatgtaattctccttggaatttgccctttttgagtttggatcttggttcattctcaagcctcagacagtggttcaaagtttttttcttccatttcaggtgtcgtgaggaattctctagagatccctcgacctcgagatccattgtgcccgggcgcaccatgacttggaccccactcctcttcctcaccctcctcctccactgcacaggaagcttatcg

SEQ ID NO: 934 - DNA, 6519 bp, Artificial Sequence
  Description of Artificial Sequence: Synthetic polynucleotide
caacccaaggctgccccctcggtcactctgttcccgccctcctctgaggagcttcaagccaacaaggccacactggtgtgtctcataagtgacttctacccgggagccgtgacagtggcctggaaggcagatagcagccccgtcaaggcgggagtggagaccaccacaccctccaaacaaagcaacaacaagtacgcggccagcagctacctgagcctgacgcctgagcagtggaagtcccacagaagctacagctgccaggtcacgcatgaagggagcaccgtggagaagacagtggcccctacagaatgttcatgagcggccgctcgaggccggcaaggccggatcccccgacctcgacctctggctaataaaggaaatttattttcattgcaatagtgtgttggaattttttgtgtctctcactcggaaggacatatgggagggcaaatcatttggtcgagatccctcggagatctctagctagaggatcgatccccgccccggacgaactaaacctgactacgacatctctgccccttcttcgcggggcagtgcatgtaatcccttcagttggttggtacaacttgccaactgggccctgttccacatgtgacacggggggggaccaaacacaaaggggttctctgactgtagttgacatccttataaatggatgtgcacatttgccaacactgagtggctttcatcctggagcagactttgcagtctgtggactgcaacacaacattgcctttatgtgtaactcttggctgaagctcttacaccaatgctgggggacatgtacctcccaggggcccaggaagactacgggaggctacaccaacgtcaatcagaggggcctgtgtagctaccgataagcggaccctcaagagggcattagcaatagtgtttataaggcccccttgttaaccctaaacgggtagcatatgcttcccgggtagtagtatatactatccagactaaccctaattcaatagcatatgttacccaacgggaagcatatgctatcgaattagggttagtaaaagggtcctaaggaacagcgatatctcccaccccatgagctgtcacggttttatttacatggggtcaggattccacgagggtagtgaaccattttagtcacaagggcagtggctgaagatcaaggagcgggcagtgaactctcctgaatcttcgcctgcttcttcattctccttcgtttagctaatagaataactgctgagttgtgaacagtaaggtgtatgtgaggtgctcgaaaacaaggtttcaggtgacgcccccagaataaaatttggacggggggttcagtggtggcattgtgctatgacaccaatataaccctcacaaaccccttgggcaataaatactagtgtaggaatgaaacattctgaatatctttaacaatagaaatccatggggtggggacaagccgtaaagactggatgtccatctcacacgaatttatggctatgggcaacacataatcctagtgcaatatgatactggggttattaagatgtgtcccaggcagggaccaagacaggtgaaccatgttgttacactctatttgtaacaaggggaaagagagtggacgccgacagcagcggactccactggttgtctctaacacccccgaaaattaaacggggctccacgccaatggggcccataaacaaagacaagtggccactcttttttttgaaattgtggagtgggggcacgcgtcagcccccacacgccgccctgcggttttggactgtaaaataagggtgtaataacttggctgattgtaaccccgctaaccactgcggtcaaaccacttgcccacaaaaccactaatggcaccccggggaatacctgcataagtaggtgggcgggccaagataggggcgcgattgctgcgatctggaggacaaattacacacacttgcgcctgagcgccaagcacagggttgttggtcctcatattcacgaggtcgctgagagcacggtgggctaatgttgccatgggtagcatatactacccaaatatctggatagcatatgctatcctaatctatatctgggtagcataggctatcctaatctatatctgggtagcatatgctatcctaatctatatctgggtagtatatgctatcctaatttatatctgggtagcataggctatcctaatctatatctgggtagcatatgctatcctaatctatatctgggtagtatatgctatcctaatctgtatccgggtagcatatgctatcctaatagagattagggtagtatatgctatcctaatttatatctgggtagcatatactacccaaatatctggatagcatatgctatcctaatctatatctgggtagcatatgctatcctaatctatatctgggtagcataggctatcctaatctatatctgggtagcatatgctatcctaatctatatctgggtagtatatgctatcctaatttatatctgggtagcataggctatcctaatctatatctgggtagcatatgctatcctaatctatatctgggtagtatatgctatcctaatctgtatccgggtagcatatgctatcctcatgataagctgtcaaacatgagaattttcttgaagacgaaagggcctcgtgatacgcctatttttataggttaatgtcatgataataatggtttcttagacgtcaggtggcacttttcggggaaatgtgcgcggaacccctatttgtttatttttctaaatacattcaaatatgtatccgctcatgagacaataaccctgataaatgcttcaataatattgaaaaaggaagagtatgagtattcaacatttccgtgtcgcccttattcccttttttgcggcattttgccttcctgtttttgctcacccagaaacgctggtgaaagtaaaagatgctgaagatcagttgggtgcacgagtgggttacatcgaactggatctcaacagcggtaagatccttgagagttttcgccccgaagaacgttttccaatgatgagcacttttaaagttctgctatgtggcgcggtattatcccgtgttgacgccgggcaagagcaactcggtcgccgcatacactattctcagaatgacttggttgagtactcaccagtcacagaaaagcatcttacggatggcatgacagtaagagaattatgcagtgctgccataaccatgagtgataacactgcggccaacttacttctgacaacgatcggaggaccgaaggagctaaccgcttttttgcacaacatgggggatcatgtaactcgccttgatcgttgggaaccggagctgaatgaagccataccaaacgacgagcgtgacaccacgatgcctgcagcaatggcaacaacgttgcgcaaactattaactggcgaactacttactctagcttcccggcaacaattaatagactggatggaggcggataaagttgcaggaccacttctgcgctcggcccttccggctggctggtttattgctgataaatctggagccggtgagcgtgggtctcgcggtatcattgcagcactggggccagatggtaagccctcccgtatcgtagttatctacacgacggggagtcaggcaactatggatgaacgaaatagacagatcgctgagataggtgcctcactgattaagcattggtaactgtcagaccaagtttactcatatatactttagattgatttaaaacttcatttttaatttaaaaggatctaggtgaagatcctttttgataatctcatgaccaaaatcccttaacgtgagttttcgttccactgagcgtcagaccccgtagaaaagatcaaaggatcttcttgagatcctttttttctgcgcgtaatctgctgcttgcaaacaaaaaaaccaccgctaccagcggtggtttgtttgccggatcaagagctaccaactctttttccgaaggtaactggcttcagcagagcgcagataccaaatactgttcttctagtgtagccgtagttaggccaccacttcaagaactctgtagcaccgcctacatacctcgctctgctaatcctgttaccagtggctgctgccagtggcgataagtcgtgtcttaccgggttggactcaagacgatagttaccggataaggcgcagcggtcgggctgaacggggggttcgtgcacacagcccagcttggagcgaacgacctacaccgaactgagatacctacagcgtgagctatgagaaagcgccacgcttcccgaagggagaaaggcggacaggtatccggtaagcggcagggtcggaacaggagagcgcacgagggagcttccagggggaaacgcctggtatctttatagtcctgtcgggtttcgccacctctgacttgagcgtcgatttttgtgatgctcgtcaggggggcggagcctatggaaaaacgccagcaacgcggcctttttacggttcctggccttttgctggccttttgctcacatgttctttcctgcgttatcccctgattctgtggataaccgtattaccgcctttgagtgagctgataccgctcgccgcagccgaacgaccgagcgcagcgagtcagtgagcgaggaagcggaagagcgcccaatacgcaaaccgcctctccccgcgcgttggccgattcattaatgcagctggcacgacaggtttcccgactggaaagcgggcagtgagcgcaacgcaattaatgtgagttagctcactcattaggcaccccaggctttacactttatgcttccggctcgtatgttgtgtggaattgtgagcggataacaatttcacacaggaaacagctatgaccatgattacgccaagctctagctagaggtcgagtccctccccagcaggcagaagtatgcaaagcatgcatctcaattagtcagcaaccatagtcccgcccctaactccgcccatcccgcccctaactccgcccagttccgcccattctccgccccatggctgactaattttttttatttatgcagaggccgaggccgcctcggcctctgagctattccagaagtagtgaggaggcttttttggaggcctaggcttttgcaaaaagctttgcaaagatggataaagttttaaacagagaggaatctttgcagctaatggaccttctaggtcttgaaaggagtgggaattggctccggtgcccgtcagtgggcagagcgcacatcgcccacagtccccgagaagttggggggaggggtcggcaattgaaccggtgcctagagaaggtggcgcggggtaaactgggaaagtgatgtcgtgtactggctccgcctttttcccgagggtgggggagaaccgtatataagtgcagtagtcgccgtgaacgttctttttcgcaacgggtttgccgccagaacacaggtaagtgccgtgtgtggttcccgcgggcctggcctctttacgggttatggcccttgcgtgccttgaattacttccacctggctgcagtacgtgattcttgatcccgagcttcgggttggaagtgggtgggagagttcgaggccttgcgcttaaggagccccttcgcctcgtgcttgagttgaggcctggcctgggcgctggggccgccgcgtgcgaatctggtggcaccttcgcgcctgtctcgctgctttcgataagtctctagccatttaaaatttttgatgacctgctgcgacgctttttttctggcaagatagtcttgtaaatgcgggccaagatctgcacactggtatttcggtttttggggccgcgggcggcgacggggcccgtgcgtcccagcgcacatgttcggcgaggcggggcctgcgagcgcggccaccgagaatcggacgggggtagtctcaagctggccggcctgctctggtgcctggcctcgcgccgccgtgtatcgccccgccctgggcggcaaggctggcccggtcggcaccagttgcgtgagcggaaagatggccgcttcccggccctgctgcagggagctcaaaatggaggacgcggcgctcgggagagcgggcgggtgagtcacccacacaaaggaaaagggcctttccgtcctcagccgtcgcttcatgtgactccacggagtaccgggcgccgtccaggcacctcgattagttctcgagcttttggagtacgtcgtctttaggttggggggaggggttttatgcgatggagtttccccacactgagtgggtggagactgaagttaggccagcttggcacttgatgtaattctccttggaatttgccctttttgagtttggatcttggttcattctcaagcctcagacagtggttcaaagtttttttcttccatttcaggtgtcgtgaggaattctctagagatccctcgacctcgagatccattgtgcccgggcgccaccatggacatgcgcgtgcccgcccagctgctgggcctgctgctgctgtggttccccggctcgcgatgc

SEQ ID NO: 935 - DNA, 7185 bp, Artificial Sequence
  Description of Artificial Sequence: Synthetic polynucleotide
gcgtcgaccaagggcccatcggtcttccccctggcaccctcctccaagagcacctctgggggcacagcggccctgggctgcctggtcaaggactacttccccgaaccggtgacggtgtcgtggaactcaggcgccctgaccagcggcgtgcacaccttcccggctgtcctacagtcctcaggactctactccctcagcagcgtggtgaccgtgccctccagcagcttgggcacccagacctacatctgcaacgtgaatcacaagcccagcaacaccaaggtggacaagaaagttgagcccaaatcttgtgacaaaactcacacatgcccaccgtgcccagcacctgaagccgcggggggaccgtcagtcttcctcttccccccaaaacccaaggacaccctcatgatctcccggacccctgaggtcacatgcgtggtggtggacgtgagccacgaagaccctgaggtcaagttcaactggtacgtggacggcgtggaggtgcataatgccaagacaaagccgcgggaggagcagtacaacagcacgtaccgtgtggtcagcgtcctcaccgtcctgcaccaggactggctgaatggcaaggagtacaagtgcaaggtctccaacaaagccctcccagcccccatcgagaaaaccatctccaaagccaaagggcagccccgagaaccacaggtgtacaccctgcccccatcccgcgaggagatgaccaagaaccaggtcagcctgacctgcctggtcaaaggcttctatcccagcgacatcgccgtggagtgggagagcaatgggcagccggagaacaactacaagaccacgcctcccgtgctggactccgacggctccttcttcctctacagcaagctcaccgtggacaagagcaggtggcagcaggggaacgtcttctcatgctccgtgatgcatgaggctctgcacaaccactacacgcagaagagcctctccctgtctccgggtaaatgagcggccgctcgaggccggcaaggccggatcccccgacctcgacctctggctaataaaggaaatttattttcattgcaatagtgtgttggaattttttgtgtctctcactcggaaggacatatgggagggcaaatcatttggtcgagatccctcggagatctctagctagaggatcgatccccgccccggacgaactaaacctgactacgacatctctgccccttcttcgcggggcagtgcatgtaatcccttcagttggttggtacaacttgccaactgggccctgttccacatgtgacacggggggggaccaaacacaaaggggttctctgactgtagttgacatccttataaatggatgtgcacatttgccaacactgagtggctttcatcctggagcagactttgcagtctgtggactgcaacacaacattgcctttatgtgtaactcttggctgaagctcttacaccaatgctgggggacatgtacctcccaggggcccaggaagactacgggaggctacaccaacgtcaatcagaggggcctgtgtagctaccgataagcggaccctcaagagggcattagcaatagtgtttataaggcccccttgttaaccctaaacgggtagcatatgcttcccgggtagtagtatatactatccagactaaccctaattcaatagcatatgttacccaacgggaagcatatgctatcgaattagggttagtaaaagggtcctaaggaacagcgatatctcccaccccatgagctgtcacggttttatttacatggggtcaggattccacgagggtagtgaaccattttagtcacaagggcagtggctgaagatcaaggagcgggcagtgaactctcctgaatcttcgcctgcttcttcattctccttcgtttagctaatagaataactgctgagttgtgaacagtaaggtgtatgtgaggtgctcgaaaacaaggtttcaggtgacgcccccagaataaaatttggacggggggttcagtggtggcattgtgctatgacaccaatataaccctcacaaaccccttgggcaataaatactagtgtaggaatgaaacattctgaatatctttaacaatagaaatccatggggtggggacaagccgtaaagactggatgtccatctcacacgaatttatggctatgggcaacacataatcctagtgcaatatgatactggggttattaagatgtgtcccaggcagggaccaagacaggtgaaccatgttgttacactctatttgtaacaaggggaaagagagtggacgccgacagcagcggactccactggttgtctctaacacccccgaaaattaaacggggctccacgccaatggggcccataaacaaagacaagtggccactcttttttttgaaattgtggagtgggggcacgcgtcagcccccacacgccgccctgcggttttggactgtaaaataagggtgtaataacttggctgattgtaaccccgctaaccactgcggtcaaaccacttgcccacaaaaccactaatggcaccccggggaatacctgcataagtaggtgggcgggccaagataggggcgcgattgctgcgatctggaggacaaattacacacacttgcgcctgagcgccaagcacagggttgttggtcctcatattcacgaggtcgctgagagcacggtgggctaatgttgccatgggtagcatatactacccaaatatctggatagcatatgctatcctaatctatatctgggtagcataggctatcctaatctatatctgggtagcatatgctatcctaatctatatctgggtagtatatgctatcctaatttatatctgggtagcataggctatcctaatctatatctgggtagcatatgctatcctaatctatatctgggtagtatatgctatcctaatctgtatccgggtagcatatgctatcctaatagagattagggtagtatatgctatcctaatttatatctgggtagcatatactacccaaatatctggatagcatatgctatcctaatctatatctgggtagcatatgctatcctaatctatatctgggtagcataggctatcctaatctatatctgggtagcatatgctatcctaatctatatctgggtagtatatgctatcctaatttatatctgggtagcataggctatcctaatctatatctgggtagcatatgctatcctaatctatatctgggtagtatatgctatcctaatctgtatccgggtagcatatgctatcctcatgataagctgtcaaacatgagaattttcttgaagacgaaagggcctcgtgatacgcctatttttataggttaatgtcatgataataatggtttcttagacgtcaggtggcacttttcggggaaatgtgcgcggaacccctatttgtttatttttctaaatacattcaaatatgtatccgctcatgagacaataaccctgataaatgcttcaataatattgaaaaaggaagagtatgagtattcaacatttccgtgtcgcccttattcccttttttgcggcattttgccttcctgtttttgctcacccagaaacgctggtgaaagtaaaagatgctgaagatcagttgggtgcacgagtgggttacatcgaactggatctcaacagcggtaagatccttgagagttttcgccccgaagaacgttttccaatgatgagcacttttaaagttctgctatgtggcgcggtattatcccgtgttgacgccgggcaagagcaactcggtcgccgcatacactattctcagaatgacttggttgagtactcaccagtcacagaaaagcatcttacggatggcatgacagtaagagaattatgcagtgctgccataaccatgagtgataacactgcggccaacttacttctgacaacgatcggaggaccgaaggagctaaccgcttttttgcacaacatgggggatcatgtaactcgccttgatcgttgggaaccggagctgaatgaagccataccaaacgacgagcgtgacaccacgatgcctgcagcaatggcaacaacgttgcgcaaactattaactggcgaactacttactctagcttcccggcaacaattaatagactggatggaggcggataaagttgcaggaccacttctgcgctcggcccttccggctggctggtttattgctgataaatctggagccggtgagcgtgggtctcgcggtatcattgcagcactggggccagatggtaagccctcccgtatcgtagttatctacacgacggggagtcaggcaactatggatgaacgaaatagacagatcgctgagataggtgcctcactgattaagcattggtaactgtcagaccaagtttactcatatatactttagattgatttaaaacttcatttttaatttaaaaggatctaggtgaagatcctttttgataatctcatgaccaaaatcccttaacgtgagttttcgttccactgagcgtcagaccccgtagaaaagatcaaaggatcttcttgagatcctttttttctgcgcgtaatctgctgcttgcaaacaaaaaaaccaccgctaccagcggtggtttgtttgccggatcaagagctaccaactctttttccgaaggtaactggcttcagcagagcgcagataccaaatactgttcttctagtgtagccgtagttaggccaccacttcaagaactctgtagcaccgcctacatacctcgctctgctaatcctgttaccagtggctgctgccagtggcgataagtcgtgtcttaccgggttggactcaagacgatagttaccggataaggcgcagcggtcgggctgaacggggggttcgtgcacacagcccagcttggagcgaacgacctacaccgaactgagatacctacagcgtgagctatgagaaagcgccacgcttcccgaagggagaaaggcggacaggtatccggtaagcggcagggtcggaacaggagagcgcacgagggagcttccagggggaaacgcctggtatctttatagtcctgtcgggtttcgccacctctgacttgagcgtcgatttttgtgatgctcgtcaggggggcggagcctatggaaaaacgccagcaacgcggcctttttacggttcctggccttttgctggccttttgctcacatgttctttcctgcgttatcccctgattctgtggataaccgtattaccgcctttgagtgagctgataccgctcgccgcagccgaacgaccgagcgcagcgagtcagtgagcgaggaagcggaagagcgcccaatacgcaaaccgcctctccccgcgcgttggccgattcattaatgcagctggcacgacaggtttcccgactggaaagcgggcagtgagcgcaacgcaattaatgtgagttagctcactcattaggcaccccaggctttacactttatgcttccggctcgtatgttgtgtggaattgtgagcggataacaatttcacacaggaaacagctatgaccatgattacgccaagctctagctagaggtcgagtccctccccagcaggcagaagtatgcaaagcatgcatctcaattagtcagcaaccatagtcccgcccctaactccgcccatcccgcccctaactccgcccagttccgcccattctccgccccatggctgactaattttttttatttatgcagaggccgaggccgcctcggcctctgagctattccagaagtagtgaggaggcttttttggaggcctaggcttttgcaaaaagctttgcaaagatggataaagttttaaacagagaggaatctttgcagctaatggaccttctaggtcttgaaaggagtgggaattggctccggtgcccgtcagtgggcagagcgcacatcgcccacagtccccgagaagttggggggaggggtcggcaattgaaccggtgcctagagaaggtggcgcggggtaaactgggaaagtgatgtcgtgtactggctccgcctttttcccgagggtgggggagaaccgtatataagtgcagtagtcgccgtgaacgttctttttcgcaacgggtttgccgccagaacacaggtaagtgccgtgtgtggttcccgcgggcctggcctctttacgggttatggcccttgcgtgccttgaattacttccacctggctgcagtacgtgattcttgatcccgagcttcgggttggaagtgggtgggagagttcgaggccttgcgcttaaggagccccttcgcctcgtgcttgagttgaggcctggcctgggcgctggggccgccgcgtgcgaatctggtggcaccttcgcgcctgtctcgctgctttcgataagtctctagccatttaaaatttttgatgacctgctgcgacgctttttttctggcaagatagtcttgtaaatgcgggccaagatctgcacactggtatttcggtttttggggccgcgggcggcgacggggcccgtgcgtcccagcgcacatgttcggcgaggcggggcctgcgagcgcggccaccgagaatcggacgggggtagtctcaagctggccggcctgctctggtgcctggcctcgcgccgccgtgtatcgccccgccctgggcggcaaggctggcccggtcggcaccagttgcgtgagcggaaagatggccgcttcccggccctgctgcagggagctcaaaatggaggacgcggcgctcgggagagcgggcgggtgagtcacccacacaaaggaaaagggcctttccgtcctcagccgtcgcttcatgtgactccacggagtaccgggcgccgtccaggcacctcgattagttctcgagcttttggagtacgtcgtctttaggttggggggaggggttttatgcgatggagtttccccacactgagtgggtggagactgaagttaggccagcttggcacttgatgtaattctccttggaatttgccctttttgagtttggatcttggttcattctcaagcctcagacagtggttcaaagtttttttcttccatttcaggtgtcgtgaggaattctctagagatccctcgacctcgagatccattgtgcccgggcgccaccatggagtttgggctgagctggctttttcttgtcgcgattttaaaaggtgtccagtgc
